(19) United States
(12) Patent Application Publication
(10) Pub. No.: US 2025/0189534 A1
(43) Pub. Date: Jun. 12, 2025

(54) SAMPLE PREPARATION FOR GLYCOPROTEOMIC ANALYSIS THAT INCLUDES DIAGNOSIS OF DISEASE

(71) Applicant: VENN BIOSCIENCES CORPORATION, South San Francisco, CA (US)

(72) Inventors: Paul Oluwaseyi AIYETAN, Frederick, MD (US); Matthew Peter CAMPBELL, Melbourne, Victoria (AU); Xin CONG, South San Francisco, CA (US); Garrett Anders COUTRE, Davis, CA (US); Arshia Bassi DEEP, Union City, CA (US); Monil Dilip GANDHI, South San Francisco, CA (US); Hector Han-Li HUANG, South San Francisco, CA (US); Alan Nicolas MITCHELL, South San Francisco, CA (US); Kenan PANDZA, Pleasant Hill, CA (US); Chad Eagle PICKERING, South San Francisco, CA (US); Flavio SCHWARZ, South San Francisco, CA (US); Daniel SERIE, South San Francisco, CA (US); Apoorva SRINIVASAN, San Francisco, CA (US); Saurabh SRIVASTAVA, South San Francisco, CA (US); Diane Nai-Fan TU, Pacifica, CA (US); Gege XU, South San Francisco, CA (US); Rao Siddhant YADAV, Melbourne, Victoria (AU); Bo ZHOU, Los Angeles, CA (US)

(21) Appl. No.: 18/840,561

(22) PCT Filed: Feb. 24, 2023
(86) PCT No.: PCT/US2023/063298

§ 371 Date: Aug. 22, 2024

Related U.S. Application Data
(60) Provisional application No. 63/313,690, filed on Feb. 24, 2022.
(60) Provisional application No. 63/313,693, filed on Feb. 24, 2022.
(60) Provisional application No. 63/314,274, filed on Feb. 25, 2022.
(60) Provisional application No. 63/314,895, filed on Feb. 28, 2022.
(60) Provisional application No. 63/337,933, filed on May 3, 2022.
(60) Provisional application No. 63/395,714, filed on Aug. 5, 2022.
(60) Provisional application No. 63/396,546, filed on Aug. 9, 2022.
(60) Provisional application No. 63/402,813, filed on Aug. 31, 2022.
(60) Provisional application No. 63/375,836, filed on Sep. 15, 2022.
(60) Provisional application No. 63/477,808, filed on Dec. 29, 2022.

(51) Int. Cl. G01N 33/68; G01N 30/06; G01N 33/543; G16B 40/10; G16H 50/20

(52) U.S. Cl. CPC G01N 33/6848; G01N 30/06; G01N 33/54366; G01N 33/6893; G16B 40/10; G16H 50/20; G01N 2030/067; G01N 2458/15; G01N 2800/50; G01N 2800/52

(57) ABSTRACT

A method, system, and composition related to the preparation of samples for glycoproteomic analysis is described. The sample preparation process can include a proteolytic digestion step followed by a measurement step of the glycopeptide and peptide amounts in the proteolytic digest using a liquid chromatography-mass spectrometry system. Optionally, the sample preparation process can also include the collection of the sample on an absorbent or bibulous member where the proteins and glycoproteins are later extracted and then digested for glycoproteomic analysis. Glycopeptide and peptide measurements of biological samples were analyzed to provide a diagnosis of a disease such as, for example, ovarian cancer or to assess whether a patient with melanoma is likely or not likely to benefit from checkpoint inhibitor therapy.

### CROSS-REFERENCE TO RELATED APPLICATIONS

[0001] This application claims the priority benefit of U.S. Provisional Patent Application Ser. No. 63/313,693, filed Feb. 24, 2022 [Attorney Docket No. 16653-30013.00/VENN-00022PR]; U.S. Provisional Patent Application Ser. No. 63/313,690, filed Feb. 24, 2022; [Attorney Docket No. 16653-30016.00/VENN-00026PR]; U.S. Provisional Patent Application Ser. No. 63/314,274, filed Feb. 25, 2022; [Attorney Docket No. 16653-30017.00/VENN-00027PR]; U.S. Provisional Patent Application Ser. No. 63/314,895, filed Feb. 28, 2022; [Attorney Docket No. 16653-30018.00/VENN-00030PR]; U.S. Provisional Patent Application Ser. No. 63/337,933, filed May 3, 2022; [Attorney Docket No. 16653-30021.00/VENN-00035PR]; U.S. Provisional Patent Application Ser. No. 63/395,714, filed Aug. 5, 2022; [Attorney Docket No. VENN.P0020USP1/1001219027/VENN-00046PR]; U.S. Provisional Patent Application Ser. No. 63/402,813, filed Aug. 31, 2022; [Attorney Docket No. VENN.P0020USP2/1001222750/VENN-00046P1]; U.S. Provisional Patent Application Ser. No. 63/477,808, filed Dec. 29, 2022; [Attorney Docket No. VENN-00046P2]; U.S. Provisional Patent Application Ser. No. 63/396,546, filed Aug. 9, 2022; [Attorney Docket No. 16653-30026.00/VENN-00051PR]; and U.S. Provisional Patent Application Ser. No. 63/375,836, filed Sep. 15, 2022; [Attorney Docket No. VENN-00060PR], which are hereby all incorporated by reference herein in their entirety.

### TECHNICAL FIELD

[0002] The present disclosure, in certain aspects, is directed to methods and systems, and compositions and information obtained therefrom, for preparing a proteolytic digestion of a sample comprising a glycoprotein and techniques for introducing a proteolytic digestion to a mass spectrometer. In other aspects, the sample was in an absorbent or bibulous member, such as a dried blood spot card, comprising one or more extraction internal standards comprising at least one polypeptide standard deposited thereon prior to deposition of a blood sample. In other aspects, the sample on the absorbent or bibulous member was analyzed for ovarian cancer glycopeptide biomarkers. In other aspects, a blood-derived samples (e.g., plasma) was processed to form fibrinogen-depleted samples before analyzing with liquid chromatography-mass spectrometry. In other aspects, the disclosure relates to methods and systems for analyzing peptide structures for the generation of a composite measure that represents the weighted average of each glycan monomer across glycan species. In other aspects, the composite measure was determined to predict whether a patient is not likely to benefit from checkpoint inhibitor therapy. In other aspects, the disclosure of the systems and methods relate to predicting retention times in mass spectrometry runs related to quantifying or detecting peptides in biological samples.

### BACKGROUND

[0003] Post-translational modifications of polypeptides, including polypeptide glycosylation, play vital roles in human physiology and biological signaling. The identification of aberrant glycosylation provides opportunities for early detection, intervention, and treatment of affected subjects. Current biomarker identification methods, such as those developed in the fields of proteomics and genomics, can be used to detect indicators of certain diseases, such as cancer, and to differentiate certain types of cancer from other, non-cancerous diseases. However, the use of glycoproteomic analyses has not previously been used to successfully identify disease processes. Mass spectrometry analysis has the potential to provide in-depth information of glycoproteins although the nature of glycoproteins presents many challenges not currently addressed with conventional sample preparation and mass spectrometry workflows.

[0004] For example, heterogeneity of glycosylation poses a big challenge for large-scale serum/plasma glycopeptide identification and quantitation due to low concentration of individual glycopeptides compared to unglycosylated peptides in a proteolytic digest. There is a need in the art for processing techniques to prepare proteolytic digest samples for use in liquid chromatography-mass spectrometry analysis of glycopeptides.

[0005] Robust, repeatable, and high-throughput mass spectrometry-bases analyses are challenging in view of sample source and pre-processing heterogeneity, and the diverse array and low abundance of glycosylation biomarkers having diagnostic significance. For example, there are numerous approaches for generating plasma, including those involving the use of different anticoagulants such as Streck, EDTA, Heparin or Li-Heparin, ACD, CPDA, and oxalate fluoride. The result is a non-uniform sample source, which can readily hamper biomarker development and assessment. Furthermore, biomarkers, including unique glycosylation of peptide sequences, are often very low abundance species as compared to high abundant proteins in blood-derived samples (e.g., plasma or serum) making biomarker studies difficult even using mass spectrometry. There is a need in the art for techniques to prepare blood-derived samples for use in mass spectrometry.

[0006] LC-MS analysis methods for assessing the state of an individual, such as using one or more biomarkers (e.g., a glycopolypeptide), require samples from the individual. Certain sample types that show promise for providing informative material for a LC-MS analysis are invasive, such as tissue samples (e.g., a tumor tissue), or require special sample handling to maintain the integrity of the components therein, such as liquid blood samples requiring, e.g., inhibition of enzymes and proper shipping and handling conditions.

[0007] A variety of proteolytic sample preparation protocols and kits are available for proteomic analysis. For example, RapiGest SF surfactant, S-Trap, and microwave-assisted digestion protocols have shown promise for preparing proteolytic digestions of non-glycosylated polypeptide sample. However, the inventors of the present application assessed such solutions for the analysis of glycoproteins and discovered a number of shortcomings associated with incomplete digestion (e.g., presence of missed cleavages), loss of certain glycopeptides prior to being analyzed by the mass spectrometer, biasing of certain glycopeptides, and poor reproducibility. As the use of glycoproteins in the study of human physiology requires techniques that provide a complete, accurate, quantified, and reproducible analysis of glycoproteins in a sample from an individual, there is a need in the art for new proteolytic digestion and liquid chromatography-mass spectrometry techniques for analyzing sample containing a glycoprotein.

[0008] Proteolytic digestion techniques introduce components, such as salts, reagents, and byproducts, that can lead to downstream system-based issues, e.g., contaminated mass spectrometers requiring more frequent cleaning maintenance, clogged or partially clogged components, and analytic issues leading to poor signal, poor reproducibility, and poor quantification. It is desirable to remove these components, but conventional techniques are hampered by loss of sample, especially more hydrophilic polypeptides, e.g., certain glycopeptides. There is a need in the art for new processing techniques to produce a processed sample suitable for use in liquid chromatography-mass spectrometry analysis of a sample containing a glycopolypeptide.

[0009] Glycoprotein analysis is fraught with challenges on several levels. For example, a single glycan composition in a peptide can contain a large number of isomeric structures due to different glycosidic linkages, branching patterns, and/or multiple monosaccharides having the same mass. In addition, the presence of multiple glycans that share the same peptide backbone can lead to assay signals from various glycoforms, lowering their individual abundances compared to aglycosylated peptides. Accordingly, the development of algorithms that can identify glycan structures on peptide fragments remains elusive.

[0010] In light of the above, there is a need for improved analytical methods that involve site-specific analysis of glycoproteins to obtain information about protein glycosylation patterns, which can in turn provide quantitative information that can be used to identify disease states. For example, there is a need to use such analysis to diagnose and/or treat melanoma.

[0011] An approach that is non-invasive, accurate, and reliable and that enables early diagnosis and informs treatment is needed. An approach enabling early diagnosis and informing treatment may help reduce negative health outcomes in patients with melanoma. Such an approach can assist in guiding a patient to an urgency for further testing, for example, or in guiding a medical practitioner in predicting whether a particular treatment (e.g., immunotherapy) may or may not be effective and informing treatment decisions accordingly. Thus, it may be desirable to have methods and systems capable of addressing one or more of the above-identified issues.

### BRIEF SUMMARY

### Section 1—Proteolytic Digestion and LC-MS Analysis Techniques for Samples Containing a Glycosylated Polypeptide

[0012] In some aspects, provided herein is a method for performing a liquid chromatography-mass spectrometry analysis of a proteolytic glycopeptide derived from a biological sample comprising a glycoprotein, the method comprising: subjecting the biological sample to a thermal denaturation technique to produce a denatured sample followed by a proteolytic digestion technique to produce a proteolytically digested sample comprising the glycopeptide, wherein the thermal denaturation technique subjects the biological sample to a thermal cycle comprising a thermal treatment of about 60° C. to about 100° C. with a hold time of at least about 1 minute, wherein the lid temperature during the thermal cycle is at least about 2° C. higher than the temperature of the block temperature during the thermal cycle, wherein the proteolytic digestion technique comprises adding an amount of one or more proteolytic enzymes and incubating for a digestion incubation time, and wherein the digestion technique comprises quenching the one or more proteolytic enzymes following the digestion incubation time; introducing the proteolytically digested sample to a liquid chromatography (LC) system of a LC-MS system; and performing a LC separation to introduce the proteolytic glycopeptide to a mass spectrometer (MS) system, wherein the LC separation comprises a period of diversion of an initial eluate comprising a salt, and wherein the LC system comprises a reversed-phase chromatography column.

[0013] In some embodiments, the method further comprises subjecting the denatured sample to a reduction technique followed by an alkylation technique prior to the proteolytic digestion technique. In some embodiments, the reduction technique comprises subjecting the denatured sample to a reduction technique to produce a reduced sample, wherein the reduction technique comprises adding an amount of a reducing agent to the denatured sample and incubating for a reducing incubation time. In some embodiments, the alkylation technique comprises subjecting the reduced sample to an alkylation technique to produce an alkylated sample, wherein the alkylation technique comprises adding an amount of an alkylating agent to the reduced sample and incubating substantially in in a low light condition for an alkylation incubation time, and wherein the alkylated technique comprises quenching the alkylating agent following the alkylation incubation time.

[0014] In other aspects, provided herein is a method for proteolytically digesting a biological sample comprising a glycoprotein to produce a proteolytic glycopeptide, the method comprising: subjecting the biological sample to a thermal denaturation technique to produce a denatured sample, wherein the thermal denaturation technique comprises subjecting the biological sample to a thermal cycle comprising a thermal treatment of about 60° C. to about 100° C. with a hold time of at least about 1 minute, wherein the lid temperature during the thermal cycle is at least about 2° C. higher than the temperature of the block temperature during the thermal cycle; subjecting the denatured sample to a reduction technique to produce a reduced sample, wherein the reduction technique comprises adding an amount of a reducing agent to the denatured sample and incubating for a reducing incubation time; subjecting the reduced sample to an alkylation technique to produce an alkylated sample, wherein the alkylation technique comprises adding an amount of an alkylating agent to the reduced sample and incubating substantially in the dark or in a low light condition for an alkylation incubation time, and wherein the alkylated technique comprises quenching the alkylating agent following the alkylation incubation time; and subjecting the alkylated sample to a proteolytic digestion technique to produce a proteolytically digested sample comprising the proteolytic glycopeptide, wherein the proteolytic digestion technique comprises adding an amount of one or more proteolytic enzymes and incubating for a digestion incubation time, and wherein the proteolytic digestion technique comprises quenching the one or more proteolytic enzymes following the digestion incubation time.

[0015] In some embodiments, the glycopeptide comprises a hydrophilic glycan portion. In some embodiments, the glycopeptide comprises a hydrophobic glycan portion.

[0016] In some embodiments, the biological sample is derived from a human. In some embodiments, the biological sample is a blood sample or a derivative thereof. In some embodiments, the biological sample is a plasma sample. In some embodiments, the biological sample is a serum sample. In some embodiments, the biological sample is not subjected to a high-abundant protein depletion technique prior to the thermal denaturation technique.

[0017] In some embodiments, the thermal cycle comprises a block set temperature of about 60° C. to about 100° C. with a hold time of at least about 1 minute. In some embodiments, the thermal cycle comprises a block ending temperature of about 15° C. to about 40° C. In some embodiments, the thermal cycle comprises a block starting temperature of about 15° C. to about 50° C. In some embodiments, the thermal cycle is performed in a thermal cycler comprising a lid temperature control element. In some embodiments, the thermal cycle comprises a ramp rate between the block set temperature and the block ending temperature of about 1° C./second to about 10° C./second.

[0018] In some embodiments, the proteolytic digestion technique is performed at a temperature of about 20° C. to about 55° C. In some embodiments, the digestion incubation time is at least about 20 minutes. In some embodiments, the proteolytic digestion technique is performed at a temperature of about 37° C. for at least about 12 hours. In some embodiments, the proteolytic digestion technique is performed using a second thermal cycle, wherein the lid temperature during the second thermal cycle is at least about 2° C. higher than the temperature of the block temperature during the second thermal cycle. In some embodiments, the second thermal cycle is performed in a thermal cycler comprising a lid temperature control element. In some embodiments, each of the one or more proteolytic enzymes is selected from the group consisting of trypsin and LysC. In some embodiments, the trypsin is methylated and/or acetylated. In some embodiments, the amount of the one or more proteolytic enzymes is in a proteolytic enzyme concentration to sample protein weight ratio of about 1:20 to about 1:40. In some embodiments, quenching the one or more proteolytic enzymes is performed using an acid. In some embodiments, the acid is formic acid (FA) or trifluoroacetic acid (TFA), or a mixture thereof.

[0019] In some embodiments, the reduction technique is performed at a temperature of about 35° C. to about 70° C. In some embodiments, the reduction incubation time is at least about 20 minutes. In some embodiments, the reduction technique is performed at a temperature of about 60° C. for at least about 50 minutes. In some embodiments, the reduction technique is performed using a third thermal cycle, wherein the lid temperature during the third thermal cycle is at least about 2° C. higher than the temperature of the block temperature during the third thermal cycle. In some embodiments, the third thermal cycle is performed in a thermal cycler comprising a lid temperature control element. In some embodiments, the reducing agent is dithiothreitol (DTT) or tris(2-carboxyethyl) phosphine (TCEP). In some embodiments, DTT is added in an amount of about 10 mM to about 100 mM.

[0020] In some embodiments, the alkylation technique is performed at a temperature of about 20° C. to about 37° C. In some embodiments, the alkylation incubation time is at least about 5 minutes. In some embodiments, the alkylation technique is performed at a temperature of about 20° C. to about 25° C. for at least about 30 minutes. In some embodiments, the alkylating agent is iodoacetamide (IAA). In some embodiments, IAA is added in an amount of about 10 mM to about 200 mM. In some embodiments, quenching the alkylating agent comprises use of a neutralizing agent. In some embodiments, the neutralizing agent is DTT.

[0021] In some embodiments, the proteolytically digested sample is introduced to the LC-MS system without performing an offline desalting technique.

[0022] In some embodiments, the period of diversion of the LC separation technique comprises about 1 to about 5 column volumes of the initial eluate that are diverted to waste.

[0023] In some embodiments, the LC-MS technique is a high pressure LC-MS technique. In some embodiments, the LC-MS technique comprises multiple reaction monitoring.

[0024] In some embodiments, the method further comprises adding a standard to the proteolytically digested sample prior to the LC-MS technique. In some embodiments, the standard is a stable isotope-internal standard (SI-IS) peptide mixture.

[0025] In some embodiments, the biological sample is admixed with a buffer prior to the thermal denaturation technique. In some embodiments, the buffer is ammonium bicarbonate. In some embodiments, the proteolytic glycopeptide comprises one or more sialic acid groups.

[0026] In some embodiments, the proteolytically digested sample introduced to the liquid chromatography (LC) system comprises one or more of the DTT, the IAA, the iodide, and a disulfide bonded 6-membered ring, wherein the disulfide bonded 6-membered ring is a byproduct of DTT.

### Section 2—Reversed-Phase Proteolytic Digestion Clean-Up Techniques for Samples Containing a Glycosylated Polypeptide

[0027] In certain aspects, provided herein is a method for processing a proteolytically digested sample to produce a processed sample suitable for use in a liquid chromatography-mass spectrometry (LC-MS) analysis, wherein the proteolytically digested sample comprises a plurality of proteolytic polypeptides comprising at least one proteolytic glycopeptide, the method comprising: performing one or more of the following: (a) subjecting the proteolytically digested sample to a solid phase extraction column comprising a reversed-phase medium according to one or more conditions to associate at least a portion of the plurality of proteolytic polypeptides with the reversed-phase medium, the one or more conditions comprising: (i) a polypeptide loading amount of about 50% or less of a binding capacity of the reversed-phase medium, wherein the binding capacity of the reversed-phase medium is based on an insulin load having 10% or less breakthrough; or (ii) a polypeptide loading concentration of about 0.6 μg/μL or less; or (b) subjecting the reversed-phase medium comprising the associated proteolytic polypeptides to a wash buffer at a wash flow rate of about 0.1 column volumes/minute to about 2 column volumes/minute; and subjecting the reversed-phase medium comprising the associated proteolytic polypeptides to an elution buffer to produce the processed sample.

[0028] In some embodiments, the one or more conditions to associate at least the portion of the plurality of proteolytic polypeptides with the reversed-phase medium comprises the polypeptide loading amount of about 50% or less of the binding capacity of the reversed-phase medium.

[0029] In some embodiments, the one or more conditions to associate at least the portion of the plurality of proteolytic polypeptides with the reversed-phase medium comprises the polypeptide loading concentration of about 0.6 μg/μL or less.

[0030] In some embodiments, the one or more conditions to associate at least the portion of the plurality of proteolytic polypeptides with the reversed-phase medium comprises the wash flow rate of about 0.1 column volumes/minute to about 2 column volumes/minute.

[0031] In some embodiments, the column comprising the reversed-phase material has a medium volume of about 1 to about 10 μL.

[0032] In some embodiments, the polypeptide loading amount is about 30 μg to about 200 μg. In some embodiments, the polypeptide loading amount is contained in a solution volume of at least about 100 μL.

[0033] In some embodiments, the wash flow rate is about 10 μL/minute or less.

[0034] In some embodiments, the reversed-phase medium comprises an alkyl-based moiety covalently bound to a solid phase. In some embodiments, the alkyl-based moiety comprises an octadecyl carbon functional group (C18) covalently bound to the solid phase. In some embodiments, the alkyl-based moiety comprises an octa carbon functional group (C8) covalently bound to the solid phase. In some embodiments, the carbon alkyl-based moiety comprises a tetra carbon functional group (C4) covalently bound to the solid phase. In some embodiments, the solid phase comprises a silica material.

[0035] In some embodiments, the reversed-phase medium comprises a hydrophobic polymer material. In some embodiments, the hydrophobic polymer material comprises a phenyl moiety. In some embodiments, the hydrophobic polymer material comprises a reaction product of divinylbenzene. In some embodiments, the hydrophobic polymer material comprises poly(styrene-co-divinylbenzene).

[0036] In some embodiments, the method further comprises subjecting the reversed-phase medium comprising the associated proteolytic polypeptides to a wash buffer prior to subjecting the reversed-phase medium to the elution buffer.

[0037] In some embodiments, the method further comprises subjecting the processed sample comprising the elution buffer to a drying technique to produce a dried sample.

[0038] In some embodiments, the method further comprises reconstituting the dried sample to produce a reconstituted sample and inputting the reconstituted sample into a LC chromatography system of a LC-MS system to obtain mass spectrometry data.

[0039] In some embodiments, the method further comprises identifying a polypeptide sequence of a glycopeptide from the mass spectrometry data. In some embodiments, the method further comprising identifying a glycan attachment site of the glycopeptide from the mass spectrometry data. In some embodiments, the method further comprises identifying a glycan structure of the glycopeptide from the mass spectrometry data. In some embodiments, the at least one glycopeptide comprises a glycan structure comprising one or more sialic acid moieties.

[0040] In some embodiments, the proteolytically digested sample is obtained from a method for proteolytically digesting a biological sample comprising a glycoprotein.

### Section 3—Absorbent or Bibulous Members Having a Polypeptide Standard and Configured for Deposition of a Blood Sample and LC-MS Analysis of Glycopeptides Therefrom

[0041] Provided herein is a method for performing a liquid chromatography-mass spectrometry (LC MS) analysis of a proteolytic glycopeptide derived from a blood sample deposited on a delimited zone of an absorbent or bibulous member wherein the blood sample comprises a plurality of polypeptides comprising at least one glycoprotein, the method comprising: extracting at least a portion of the plurality of polypeptides and one or more extraction internal standards from the blood spot card to obtain an extracted sample, wherein the blood spot card comprises the one or more extraction internal standards prior to deposition of the blood sample within the delimited zone, and wherein at least one of the one or more extraction internal standards comprises a polypeptide standard; subjecting the extracted sample or a derivative thereof to a proteolytic digestion technique to produce a proteolytically digested sample comprising the proteolytic glycopeptide; introducing at least a portion of the proteolytically digested sample to a liquid chromatography (LC) system of a LC-MS system; and performing the LC-MS analysis on at least the proteolytic glycopeptide and the one or more extraction internal standards.

[0042] In some embodiments, LC-MS analysis comprises measuring an abundance signal for the proteolytic glycopeptide and an abundance signal for the one or more extraction internal standards. In some embodiments, the LC-MS analysis further comprises calculating a concentration of the proteolytic glycopeptide based on a concentration of the one or more extraction internal standards prior to deposition on the blood spot card, the abundance signal for the proteolytic glycopeptide, and the abundance signal for the one or more extraction internal standards.

[0043] In some embodiments, the method comprises determining an extraction efficiency based on the LC-MS analysis of at least one of the one or more extraction internal standards. In some embodiments, the method comprises determining a digestion efficiency based on the LC-MS analysis of at least one of the one or more extraction internal standards. In some embodiments, the method comprises assessing a sample migration pattern based on the LC-MS analysis of at least one of the one or more extraction internal standards. In some embodiments, the one or more extraction internal standards comprise a plurality of polypeptide standards, and wherein at least two of the plurality of polypeptide standards have different amino acid lengths.

[0044] In some embodiments, the amino acid lengths of the plurality of polypeptide standards of the one or more extraction internal standards range from 4 amino acid to 1500 amino acids. In some embodiments, the at least one polypeptide standard of the one or more extraction internal standards comprises at least one internal enzymatic cleavage site. In some embodiments, the one or more extraction internal standards comprise a plurality of polypeptide standards, wherein at least two of the plurality of polypeptide standards have different net hydrophobicities as based on a computation tool or partition coefficient analysis. In some embodiments, the plurality of polypeptide standards have different net hydrophobicities comprises a hydrophobicity range of about-0.5 to about 1 according to the Grand average of hydropathicity index (GRAVY).

[0045] In some embodiments, the at least one polypeptide standard of the one or more extraction internal standards comprises a C-terminal arginine or lysine. In some embodiments, the at least one polypeptide standard of the one or more extraction internal standards comprises an amino acid sequence that does not have homology to a peptide derived from the human proteome. In some embodiments, the at least one polypeptide standard of the one or more extraction internal standards is a synthetic polypeptide. In some embodiments, the at least one polypeptide standard of the one or more extraction internal standards comprises a stable heavy isotope label. In some embodiments, the at least one polypeptide standard of the one or more extraction internal standards comprises a sequence that is orthogonal to an endogenous polypeptide of an individual from which the blood sample originates. In some embodiments, the at least one polypeptide standard of the one or more extraction internal standards is an analog of an endogenous polypeptide of an individual from which the blood sample originates. In some embodiments, the analog is a stable heavy isotope labeled analog. In some embodiments, the at least one polypeptide standard of the one or more extraction internal standards is a recombinantly expressed polypeptide.

[0046] In some embodiments, the at least one polypeptide standard of the one or more extraction internal standards is a glycopolypeptide. In some embodiments, the at least one polypeptide standard of the one or more extraction internal standards is a polypeptide that does not substantially interact with hemoglobin. In some embodiments, the at least one polypeptide standard of the one or more extraction internal standards comprises at least a contiguous 4 amino acid sequence from SEQ ID NOS: 1-7. In some embodiments, the at least one polypeptide standard of the one or more extraction internal standards comprises a sequence is selected from the group consisting of SEQ ID NOS: 8-9

[0047] In some embodiments, the bibulous or absorbent member is a blood spot card. In some embodiments, the blood spot card comprises a known amount of each of the one or more extraction internal standards. In some embodiments, the known amount of each of the one or more extraction internal standards is about 0.05 ppm to about 5 ppm. In some embodiments, the one or more extraction internal standards are deposited and dried on the blood spot card within an area having a surface area of about 1,000 mm² or less. In some embodiments, the one or more extraction internal standard are deposited and dried on the blood spot card within the delimited zone.

[0048] In some embodiments, extracting the at least the portion of the plurality of polypeptides and the one or more extraction internal standards from the blood spot card comprises: separating one or more portions of the blood spot card from the blood spot card, wherein the one or more portions of the blood spot card comprise at least a portion of the blood sample and the one or more extraction internal standards; extracting at least the portion of the plurality of polypeptides and the one or more extraction internal standards from the one or more portions of the blood spot card into an extraction solution; and precipitating at least the portion of the plurality of polypeptides and the one or more extraction internal standards to obtain the extracted sample.

[0049] In some embodiments, the one or more portions of the blood spot card comprises punching the one or more portion of the blood spot card using a punching device. In some embodiments, each of the one or more portions separated from the blood spot card have a surface area of about 2 mm² to about 100 mm².

[0050] In some embodiments, precipitating at least the portion of the plurality of polypeptides and the one or more extraction internal standards comprises subjecting the at least the portion of the plurality of polypeptides and the one or more extraction internal standards to ethanol.

[0051] In some embodiments, the method further comprises adding a solution to the extracted sample to resolubilize polypeptide content therein prior to subjecting the extracted sample or the derivative thereof to the proteolytic digestion technique. In some embodiments, the proteolytic digestion technique comprises a thermal denaturation technique. In some embodiments, the proteolytic digestion technique further comprises a reduction technique and an alkylation technique. In some embodiments, the proteolytic digestion technique comprises the use of one or more proteases. In some embodiments, the protease is trypsin.

[0052] In some embodiments, the LC-MS analysis comprises a multiple-reaction-monitoring (MRM) technique targeting the proteolytic glycopeptide and the one or more extraction internal standards. In some embodiments, the LC-MS analysis comprises a multiple-reaction-monitoring (MRM) technique targeting the one or more quantification internal standards. In some embodiments, the absorbent or bibulous member (such as a blood spot card) comprises a delimited zone having a surface area of about 1,000 mm² or less. In some embodiments, the absorbent or bibulous member (such as a blood spot card) comprises a filter paper material. In some embodiments, the filter paper material comprises a cellulose-based paper. In some embodiments, the filter paper material prevents or reduces sample hemolysis.

[0053] In some embodiments, the absorbent or bibulous member (such as a blood spot card) comprises a lateral flow material configured to separate whole blood into a portion of plasma, wherein the whole blood is deposited at the delimited zone and then a liquid portion of the whole blood laterally flows from the delimited zone to a distal zone, wherein the distal zone contains the portion of the plasma.

[0054] Also provided herein is an absorbent or bibulous member (such as a blood spot card) comprising one or more extraction internal standard deposited thereon on a delimited zone, wherein the one or more extraction internal standards comprises at least one polypeptide standard, and wherein the absorbent or bibulous member does not comprise a blood sample deposited thereon.

### Section 4—Method of Diagnosing Pelvic Tumors

[0055] Provided herein is a method of classifying a biological sample obtained from a subject with respect to a plurality of states associated with a pelvic cancer, the method comprising receiving peptide structure data corresponding to a set of glycoproteins in the biological sample; inputting quantification data identified from the peptide structure data for a set of peptide structures into a machine-learning model trained to identify a disease indicator based on the quantification data, wherein the set of peptide structures comprises at least one peptide structure identified from a plurality of peptide structures in Table 9; identifying, by the machine-learning model, the disease indicator; and classifying the biological sample with respect to a plurality of states associated with pelvic cancer based upon the identified disease indicator.

[0056] Also provided herein is a method of detecting the presence of one of a plurality of states associated with a pelvic cancer in a subject, the method comprising receiving peptide structure data corresponding to a set of glycoproteins in a biological sample obtained from a subject, wherein the peptide structure data comprises at least one peptide structure from Table 9; inputting quantification data identified from the peptide structure data for a set of peptide structures into a machine-learning model trained to identify a disease indicator based on the quantification data; and detecting the presence of a corresponding state of the plurality of states associated with the pelvic cancer in response to a determination that the identified disease indicator falls within a selected range associated with the corresponding state.

[0057] In some embodiments, the plurality of states comprises at least one of a malignant tumor or a benign tumor. In some embodiments, the machine-learning model comprises a logistic regression model. In some embodiments, the method further comprises administering to the subject an effective amount of a therapeutic agent to treat the pelvic tumor. In some embodiments, the pelvic tumor is ovarian cancer.

[0058] In some embodiments, provided herein is a method of treating a pelvic tumor in a subject comprising receiving peptide structure data corresponding to a set of glycoproteins in a biological sample obtained from a subject, wherein the peptide structure data comprises at least one peptide structure from Table 9; inputting quantification data for the at least one peptide structure into a machine-learning model trained to generate a risk score based on the quantification data; outputting, by the machine-learning model, the quantification data using the machine learning model to generate a risk score, administering an effective amount of an agent to treat the pelvic cancer based upon the risk score.

[0059] In some embodiments, provided herein is method of determining a diagnosis for a pelvic tumor in a subject comprising receiving peptide structure data corresponding to a set of glycoproteins in a biological sample; inputting quantification data identified from the peptide structure data for a set of peptide structures into a machine-learning model trained to identify a disease indicator based on the quantification data, wherein the set of peptide structure data comprises at least one peptide structure identified from a plurality of peptide structures in Table 9; identifying, by the machine-learning model, the disease indicator; and determining a diagnosis for the pelvic tumor based upon the identified disease indicator. In some embodiments, the diagnosis is the presence of a malignant tumor or a benign tumor.

[0060] Also provided herein is a method of treating a pelvic tumor in a subject comprising receiving peptide structure data corresponding to a set of glycoproteins in a biological sample; inputting quantification data identified from the peptide structure data for a set of peptide structures into a machine-learning model trained to identify a disease indicator based on the quantification data, wherein the peptide structure data comprises at least one peptide structure identified from a plurality of peptide structures in Table 9; identifying, by the machine-learning model, the disease indicator; determining a risk score the identified disease indicator; and administering an effective amount of an agent to treat the pelvic tumor based upon the risk score.

[0061] In some embodiments, provided herein is a method of treating a pelvic tumor in an individual comprising detecting the presence or amount of at least one peptide structure, wherein the at least one peptide structure comprises at least one peptide structure from Table 9, and administering an effective amount of a therapeutic agent to treat the pelvic tumor based upon the presence or amount of the peptide structure.

[0062] In some embodiments, provided herein is a method of diagnosing an individual with a benign or malignant pelvic tumor comprising detecting a presence or amount of at least one peptide structure, wherein the at least one peptide structure comprises at least one peptide structure from Table 9, and diagnosing the individual with a benign or malignant pelvic tumor based upon the presence or amount of the at least one peptide structure.

[0063] In some embodiments, provided herein is a method of diagnosing an individual with a pelvic tumor comprising detecting the presence or amount of at least one peptide structure from Table 9; inputting a quantification of the detected at least one peptide structure into a machine-learning model trained to generate a class label, determining if the class label is above or below a threshold for a classification; identifying a diagnostic classification for the individual based on whether the class label is above or below a threshold for the classification; and diagnosing the individual as having a benign or malignant pelvic tumor on the diagnostic classification.

[0064] In some embodiments, the method further comprises detecting the presence or amount of at least one peptide structure from Table 9. In some embodiments, the presence or amount of the at least one peptide structure is detected using mass spectrometry or ELISA. In some embodiments, the presence or amount of the at least one peptide structure is detected using MRM mass spectrometry. In some embodiments, the amount of at least one peptide structure is none, or below a detection limit.

[0065] In some embodiments, the at least one peptide structure comprises two or more peptide structures identified in Table 9, three or more peptides structures identified in Table 9, four or more peptide structure identified in Table 9, five or more peptide structures identified in Table 9, six or more peptide structures identified in Table 9, seven or more peptide structures identified in Table 9, or eight or more peptide structure identified in Table 9. In some embodiments, the at least one peptide structure comprises the sequence set forth in SEQ ID NOs: 35-51. In some embodiments, the at least one peptide structure comprises the sequence set forth in SEQ ID NOs: 35-42. In some embodiments, the at least one peptide structure comprises the sequence set forth in SEQ ID NOs: 43-51. In some embodiments, the at least one peptide structure comprises the sequence set forth in SEQ ID NOs: 35-40.

[0066] In some embodiments, the biological sample is a blood sample, a serum sample, or tumor tissue. In some embodiments, the biological sample is the blood sample, wherein the blood sample is deposited on a delimited zone of an absorbent or bibulous member comprising a plurality of polypeptides comprising at least one glycoprotein.

[0067] In some embodiments, the method further comprises extracting at least a portion of the plurality of polypeptides and one or more extraction internal standards from the absorbent or bibulous member to obtain an extracted sample, wherein the absorbent or bibulous member comprises the one or more extraction internal standards prior to deposition of the blood sample within the delimited zone, and wherein at least one of the one or more extraction internal standards comprises a polypeptide standard; subjecting the extracted sample or a derivative thereof to a proteolytic digestion technique to produce a proteolytically digested sample comprising the proteolytic glycopeptide; introducing at least a portion of the proteolytically digested sample to a liquid chromatography (LC) system of a LC-MS system; and performing the LC-MS analysis on at least the proteolytic glycopeptide and the one or more extraction internal standards, wherein the at least one proteolytic glycopeptide comprises at least one peptide structure set forth in Table 9.

[0068] Also provided herein is a method for performing a liquid chromatography-mass spectrometry (LC-MS) analysis of a proteolytic glycopeptide derived from a blood sample from an individual deposited on a delimited zone of a blood spot card, the method comprising obtaining a blood spot card comprising a blood sample from the individual deposited thereon, wherein the blood spot card comprises one or more extraction internal standards deposited and dried prior to deposition of the blood sample on the blood spot card, and wherein the blood spot card comprising the blood sample contains at least a portion of the blood sample and the one or more extraction internal standards in an overlapping area of the blood spot card; extracting at least a portion of the plurality of polypeptides and the one or more extraction internal standards from the blood spot card to obtain an extracted sample; subjecting the extracted sample or a derivative thereof to a proteolytic digestion technique to produce a proteolytically digested sample comprising the proteolytic glycopeptide; introducing at least a portion of the proteolytically digested sample to a liquid chromatography (LC) system of a LC-MS system; and performing an LC-MS analysis to quantify one or more biomarkers of ovarian cancer and the one or more extraction internal standards, wherein the one or more biomarkers comprise a polypeptide comprising a sequence of any of SEQ ID NOs: 35-51, and wherein at least one of the one or more biomarkers is a glycopeptide. In some embodiments, the at least one polypeptide standard of the one or more extraction internal standards comprises at least a contiguous 4 amino acid sequence from SEQ ID NOs: 14-20. In some embodiments, the at least one polypeptide standard of the one or more extraction internal standards comprises a sequence is selected from the group consisting of SEQ ID NOs: 21-22. In some embodiments, wherein the absorbent or bibulous member comprises a known amount of each of the one or more extraction internal standards.

[0069] In some embodiments, extracting the at least the portion of the plurality of polypeptides and the one or more extraction internal standards from the absorbent or bibulous member comprises separating one or more portions of the absorbent or bibulous member from the absorbent or bibulous member, wherein the one or more portions of the absorbent or bibulous member comprise at least a portion of the blood sample and the one or more extraction internal standards; extracting at least the portion of the plurality of polypeptides and the one or more extraction internal standards from the one or more portions of the absorbent or bibulous member into an extraction solution; and precipitating at least the portion of the plurality of polypeptides and the one or more extraction internal standards to obtain the extracted sample.

[0070] In some embodiments, the precipitating at least the portion of the plurality of polypeptides and the one or more extraction internal standards comprises subjecting at least the portion of the plurality of polypeptides and the one or more extraction internal standards to either ethanol, methanol, or acetone.

[0071] In some embodiments, the method, further comprises adding a solution to the extracted sample to resolubilize polypeptide content therein prior to subjecting the extracted sample or the derivative thereof to the proteolytic digestion technique. In some embodiments, the proteolytic digestion technique comprises a thermal denaturation technique. In some embodiments, the proteolytic digestion technique further comprises a reduction technique and an alkylation technique. In some embodiments, the proteolytic digestion technique comprises the use of one or more proteases. In some embodiments, the protease is trypsin.

[0072] In some embodiments, the absorbent or bibulous member comprises a filter paper material. In some embodiments, the filter paper material comprises a cellulose-based paper. In some embodiments, the filter paper material prevents or reduces sample hemolysis.

[0073] In some embodiments, the absorbent or bibulous member comprises a lateral flow material configured to separate whole blood into a portion of plasma, wherein the whole blood is deposited at the delimited zone and then a liquid portion of the whole blood laterally flows from the delimited zone to a distal zone, wherein the distal zone contains the portion of the plasma.

[0074] Also provided herein is a method of training a model to diagnose a subject with one of a plurality of states associated with a pelvic tumor, the method comprising receiving quantification data for a panel of peptide structures for a plurality of subjects diagnosed with the plurality of states associated with a pelvic tumor wherein the panel of peptide structures comprises at least one peptide structure set forth in Table 9; and training a machine-learning model to determine a state of the plurality of states a biological sample from the subject based on the quantification data.

[0075] In some embodiments, the quantification data comprises at least one of an abundance, a relative abundance, a normalized abundance, a relative quantity, an adjusted quantity, a normalized quantity, a relative concentration, an adjusted concentration, or a normalized concentration.

[0076] In some embodiments, the machine-learning model is trained using random forest or logical progression training methods.

[0077] In some embodiments, training the machine-learning model to determine the state of the plurality of states comprises training the machine-learning model to generate a class label for the state of the plurality of states.

[0078] In some embodiments, the machine-learning model comprises a logistic regression model.

[0079] In some embodiments, at least one of the peptide structures comprises a glycopeptide.

[0080] Also provided herein is a composition comprising one or more peptide structure from Table 9.

[0081] Also provided herein is a composition comprising one or more peptides comprising the sequence set forth in SEQ ID NOs: 35-51.

### Section 5—HILIC Enrichment Sample Preparation for Quantitative Mass Spectrometry

[0082] In certain aspects, provided is a method for processing a proteolytic digest sample for use in a liquid chromatography-mass spectrometry (LC-MS) analysis, wherein the proteolytic digest sample comprises a plurality of proteolytically digested peptides comprising at least one proteolytically digested glycopeptide, the method comprising: (A) loading a hydrophilic interaction liquid chromatography (HILIC) load derived from the proteolytic digest sample to a solid phase extraction column comprising a HILIC medium according to one or more conditions to associate the at least one proteolytically digested glycopeptide with the HILIC medium, the one or more conditions comprising: (1) the loading of the HILIC load to the solid phase extraction column is initiated when the HILIC medium is in a dry state; (2) the HILIC load loaded to the solid phase extraction column has an amount of the plurality of proteolytically digested peptides characterized by one or both of: (a) a ratio of the weight of the plurality of proteolytically digested peptides over the weight of the HILIC medium in the dry state of at least about 0.06; and/or (b) a ratio of the weight of the plurality of proteolytically digested peptides relative to the bed volume of the HILIC medium in the dry state of at least about 40 μg/μl; or (3) the HILIC load loaded to the solid phase extraction column has a concentration of an organic solvent of at least about 70% (v/v); and (B) subjecting the HILIC medium to an elution liquid to obtain a HILIC eluate comprising the at least one proteolytically digested glycopeptide.

[0083] In some embodiments, the one or more loading conditions comprise the loading of the HILIC load to the solid phase extraction column being initiated when the HILIC medium is in the dry state.

[0084] In some embodiments, the HILIC load is characterized by having a ratio of the weight of the plurality of proteolytically digested peptides over the weight of the HILIC medium in the dry state of at least about 0.06. In some embodiments, the HILIC load is characterized by having a ratio of the weight of the plurality of proteolytically digested peptides relative to the bed volume of the HILIC medium in the dry state of at least about 40 μg/μl. In some embodiments, the weight of the HILIC medium in the dry state is about 3 mg or the bed volume of the HILIC medium in the dry state is about 5 μL. In some embodiments, the HILIC load is characterized by having a ratio of the weight of the plurality of proteolytically digested peptides over the weight of the HILIC medium in the dry state of about 0.1. In some embodiments, the HILIC load is characterized by having a ratio of the weight of the plurality of proteolytically digested peptides relative to the bed volume of the HILIC medium in the dry state of about 60 μg/μl. In some embodiments, the HILIC load is characterized by having a ratio of the weight of the plurality of proteolytically digested peptides over the weight of the HILIC medium in the dry state of about 0.2. In some embodiments, the HILIC load is characterized by having a ratio of the weight of the plurality of proteolytically digested peptides relative to the bed volume of the HILIC medium in the dry state of about 120 μg/μl.

[0085] In some embodiments, the one or more conditions comprise the HILIC load loaded to the solid phase extraction column having a concentration of the organic solvent of at least about 70% (v/v).

[0086] In some embodiments, the HILIC medium comprises less than about 5% (v/v) of a liquid at the initiation of the loading of the HILIC load to the solid phase extraction column. In some embodiments, wherein, at the initiation of the loading of the HILIC load to the HILIC medium of the solid phase extraction column, the HILIC medium is not equilibrated with an equilibration liquid.

[0087] In some embodiments, the HILIC load comprises an amount of the plurality of proteolytically digested peptides of at least about 200 μg.

[0088] In some embodiments, the concentration of the organic solvent in the HILIC load is at least about 80% (v/v). In some embodiments, the organic solvent comprises an aprotic solvent miscible in water. In some embodiments, the organic solvent is selected from the group consisting of acetonitrile, ethanol, methanol, tetrahydrofuran, and dioxane, or a combination thereof.

[0089] In some embodiments, the method further comprises obtaining the HILIC load. In some embodiments, the obtaining the HILIC load comprises reducing a liquid content from the proteolytic digest sample without substantial loss of the plurality of proteolytically digested peptides in the proteolytic digest sample. In some embodiments, the reducing the liquid content from the proteolytic digested sample comprises performing a peptide concentrating technique with the proteolytically digested sample to obtain a precursor of the HILIC load such that (a) the precursor can be reconstituted with a reconstitution liquid comprising the organic solvent to obtain the HILIC load having a volume of 220 μL or less and a concentration of the organic solvent of at least about 70% (v/v); and (b) the resulting HILIC load comprises an amount of the plurality of proteolytically digested peptides of at least about 200 μg.

[0090] In some embodiments, the method further comprises: reducing a liquid content from the proteolytic digest sample to form a dried proteolytic digest sample; and reconstituting the dried proteolytic digest sample with a reconstitution liquid comprising the organic solvent to produce the HILIC load such that (a) the HILIC load has a volume of 220 μL or less and a concentration of the organic solvent of at least about 70% (v/v); and (b) the HILIC load has an amount of the plurality of proteolytic peptides of at least about 200 μg.

[0091] In some embodiments, the reconstituting the dried proteolytic digest sample comprises: mixing the dried proteolytic digest sample with an amount of water to form a water mixture: sonicating the water mixture with a sonicator; mixing the water mixture with an amount of trifluoracetic acid (TFA) and acetonitrile (ACN), wherein the amount of TFA and ACN are such that the final concentration of TFA is 1% (v/v) and the final concentration of ACN is 80% (v/v); and sonicating the water mixture having the amount of TFA and ACN with a sonicator to produce the HILIC load. In some embodiments, the sonicating the water mixture with the sonicator comprises a water-based dissolution cycle, wherein the water-based dissolution cycle is repeated about 2 times to about 5 times, and wherein for each of the water-based dissolution cycles, the sonicating the water mixture is performed for about 5 minutes and a water reservoir of the sonicator is configured with ice to cool the water reservoir. In some embodiments, the sonicating the water mixture having the amount of TFA and ACN with the sonicator comprises an organic-based dissolution cycle, wherein the organic-based dissolution cycle is repeated about 2 times to about 3 times, and wherein for each of the organic-based dissolution cycles, the sonicating is performed for about 4 minutes and a water reservoir of the sonicator is configured with ice to cool the water reservoir.

[0092] In some embodiments, the reducing the liquid content from the proteolytic digest sample comprises removing all or substantially all of the liquid content therefrom.

[0093] In some embodiments, the peptide concentrating technique comprises a vacuum evaporation technique or a lyophilization technique.

[0094] In some embodiments, the volume of the HILIC load is 220 μL or less.

[0095] In some embodiments, the HILIC medium comprises a solid phase or a solid phase comprising a polar functional moiety. In some embodiments, the solid phase comprises a silica material. In some embodiments, the polar functional moiety comprises one or more of an amino group, a cyano group, a carbamoyl group, an aminoalkyl group, alkylamide group, or a combination thereof.

[0096] In some embodiments, the method further comprises performing a washing step after loading the HILIC load to the solid phase extraction column and prior to the subjecting the HILIC medium to the elution liquid, wherein the washing step comprises subjecting the HILIC medium to a wash liquid.

[0097] In some embodiments, the method further comprises collecting the HILIC eluate, or a fraction thereof, from the solid phase extraction column, wherein the HILIC eluate comprises the at least one proteolytically digested glycopeptide. In some embodiments, after the collecting the HILIC eluate from the solid phase extraction column, the method further comprises reducing a liquid content of the collected HILIC eluate.

[0098] In some embodiments, the method further comprises subjecting the HILIC eluate to a peptide concentrating technique to produce a dried HILIC eluate.

[0099] In some embodiments, the method further comprises reconstituting the dried HILIC eluate to form a sample suitable for introduction to the LC-MS system.

[0100] In some embodiments, the method further comprises injecting the sample suitable for introduction to the LC-MS system into the LC-MS system.

[0101] In some embodiments, the method further comprises performing a mass spectrometry technique to obtain mass spectrometry data.

[0102] In some embodiments, the method further comprises identifying a peptide sequence of a glycopeptide from the mass spectrometry data.

[0103] In some embodiments, the method further comprises identifying a glycan attachment site of the glycopeptide from the mass spectrometry data.

[0104] In some embodiments, the method further comprises identifying a glycan structure of the glycopeptide from the mass spectrometry data.

[0105] In some embodiments, the at least one glycopeptide comprises a glycan structure comprising one or more sialic acid moieties.

[0106] In some embodiments, the proteolytic digest sample is obtained from a method for proteolytically digesting a biological sample comprising a glycoprotein.

[0107] In some embodiments, wherein a glycopeptide concentration for a glycopeptide derived from the proteolytic digest sample is enriched by a factor of 30 or greater with respect to a peptide concentration, wherein the peptide concentration represents an amount of a peptide that is associated with the same protein as the glycopeptide.

[0108] In some embodiments, the method further comprises: measuring a first plurality of peak area values for a first panel of glycopeptides; measuring a second plurality of peak area values for a second panel of unglycosylated peptides wherein each of the unglycosylated peptides of the second panel corresponds to each of the glycopeptides of the first panel by being attached to a same protein molecule before a proteolytic digestion; calculating a plurality of ratios by dividing each of the first plurality of peak area values with each of the second plurality of peak area values, respectively; and determining a median ratio from the plurality of ratios, wherein the median ratio is greater than 30.

### Section 6—Fibrinogen-Depletion and Use Thereof in Glycoproteomic Analysis

[0109] In certain aspects, provided herein is a method of processing a blood-derived sample obtained from an individual for a glycoproteomic mass spectrometry (MS) technique, the method comprising: (a) admixing the blood-derived sample with one or more defibrination factors to promote formation of a fibrin clot, the one or more defibrination factors comprises one or more members selected from the group consisting of: a clotting co-factor; a clotting enzyme; and a clotting activator and/or an exogenous surface aggregation agent; (b) separating the formed fibrin clot from the admixed blood-derived sample to obtain a fibrinogen-depleted sample; and (c) subjecting the fibrinogen-depleted sample to one or more MS preparation techniques to produce a test sample for the glycoproteomic mass spectrometry technique.

[0110] In some embodiments, the one or more defibrination factors comprises a clotting co-factor. In some embodiments, the clotting co-factor comprises a divalent cation. In some embodiments, the clotting co-factor comprises the divalent cation, and wherein the divalent cation is Ca²⁺, Mg²⁺, Zn²⁺, or Cu²⁺, or any combination thereof. In some embodiments, the divalent cation is Ca²⁺. In some embodiments, the clotting co-factor is calcium chloride, calcium acetate, calcium carbonate, calcium citrate, or calcium gluconate, or any combination thereof. In some embodiments, following admixing with the blood-derived sample, the clotting co-factor has a concentration of about 5 mM to about 25 mM.

[0111] In some embodiments, the one or more defibrination factors comprises a clotting enzyme. In some embodiments, the clotting enzyme is thrombin. In some embodiments, following admixing with the blood-derived sample, the clotting enzyme has a concentration of about 1 unit/mL to 10 units/mL.

[0112] In some embodiments, the one or more defibrination factors comprises a clotting activator and/or the exogenous surface aggregation agent. In some embodiments, the clotting activator and/or the exogenous surface aggregation agent is an exogenous surface aggregation agent. In some embodiments, the exogenous surface aggregation agent comprises Kaolin. In some embodiments, the clotting activator and/or the exogenous surface aggregation agent is a clotting activator and exogenous surface aggregation agent. In some embodiments, the clotting activator and exogenous surface aggregation agent comprises a material having pores with an average size of about 2 nm to about 60 nm. In some embodiments, the clotting activator and exogenous surface aggregation agent comprises a silica particle. In some embodiments, the silica particle has a pore size ranging from about 2 to about 60 nm. In some embodiments, the clotting activator and/or the exogenous surface aggregation agent is admixed with the blood-derived sample at an amount of about 50 μg to about 500 μg per 40 μL of the blood-derived sample.

[0113] In some embodiments, the one or more defibrination factors comprise the clotting co-factor and the clotting enzyme.

[0114] In some embodiments, the one or more defibrination factors comprise the clotting co-factor and the clotting activator and/or the exogenous surface aggregation agent.

[0115] In some embodiments, the one or more defibrination factors comprise the clotting enzyme and the clotting activator and/or the exogenous surface aggregation agent.

[0116] In some embodiments, the one or more defibrination factors comprise the clotting co-factor, the clotting enzyme, and the clotting activator and/or the exogenous surface aggregation agent.

[0117] In some embodiments, more than one defibrination factor is admixed with the blood-derived sample sequentially. In some embodiments, more than one defibrination factor is admixed with the blood-derived sample simultaneously. In some embodiments, at least one of the one or more defibrination factors is added to a vessel containing the blood-derived sample. In some embodiments, the blood-derived sample is added to a vessel containing at least one of the one or more defibrination factors.

[0118] In some embodiments, the method further comprises an incubation period following the admixing of the blood-derived sample with one or more defibrination factors. In some embodiments, the incubation period is about 1 minute to about 30 minutes.

[0119] In some embodiments, the separating the formed fibrin clot to obtain the fibrinogen-depleted sample comprises subjecting the admixed blood-derived sample with the one or more defibrination factors to a centrifugation technique and/or a filtration technique. In some embodiments, the separating the formed fibrin clot to obtain the fibrinogen-depleted sample comprises subjecting the admixed blood-derived sample with the one or more defibrination factors to a supernatant collection technique.

[0120] In some embodiments, the fibrinogen-depleted sample is depleted of at least about 80% of the fibrinogen as compared to the blood-derived sample.

[0121] In some embodiments, the fibrinogen-depleted sample is depleted of at least about 99% of the fibrinogen as compared to the blood-derived sample.

[0122] In some embodiments, the blood-derived sample is a plasma sample. In some embodiments, the plasma sample has been treated with an anticoagulant. In some embodiments, the plasma sample has been treated with any one or more of the following: a citrate, an ACD (anticoagulant citrate dextrose), Streck, EDTA (ethylenediaminetetraacetic acid), Heparin or Li-Heparin, oxalate fluoride, or a citrate phosphate dextrose adenine (CPDA). In some embodiments, the blood-derived sample is a serum sample. In some embodiments, the blood-derived sample is obtained from a mammal, such as a human. In some embodiments, the blood-derived sample is from a single individual, such as a single human. In some embodiments, the blood-derived sample is from a single draw from an individual. In some embodiments, the blood-derived sample is a pooled sample, such as from one or more draws from an individual and/or from one or more individuals.

[0123] In some embodiments, the one or more MS preparation techniques comprises subjecting the fibrinogen-depleted sample, or a derivative thereof, to a thermal denaturation technique. In some embodiments, the one or more MS preparation techniques comprises subjecting the fibrinogen-depleted sample, or a derivative thereof, to a proteolytic digestion technique. In some embodiments, the proteolytic digestion technique comprises the use of one or more proteases. In some embodiments, the proteolytic digestion technique comprises the use of trypsin. In some embodiments, the one or more proteases are present at a weight ratio of about 1:30 or less, relative to polypeptide content of the fibrinogen-depleted sample, or a derivative thereof. In some embodiments, the one or more MS preparation techniques comprises subjecting the fibrinogen-depleted sample, or a derivative thereof, to a desalting technique. In some embodiments, the method further comprises performing a glycoproteomic mass spectrometry technique. In some embodiments, the glycoproteomic mass spectrometry technique comprises a liquid chromatography-mass spectrometry (MS) (LC-MS) technique. In some embodiments, the LC-MS technique comprises a period of diversion of an initial eluate comprising a salt. In some embodiments, the glycoproteomic mass spectrometry technique comprises a multiple-reaction-monitoring (MRM) technique targeting a glycopeptide.

[0124] In certain aspects, provided herein is a method of preparing a plasma sample obtained from an individual (such as a human) for a glycoproteomic mass spectrometry technique, the method comprising: (a) admixing the plasma sample with defibrination factors to promote formation of a fibrin clot, the defibrination factors comprising: a clotting co-factor; a clotting enzyme; and a clotting activator and/or an exogenous surface aggregation agent; (b) separating the formed fibrin clot from the admixed plasma sample to obtain a fibrinogen-depleted sample; and (c) subjecting the fibrinogen-depleted sample to one or more MS preparation techniques to produce a test sample for the glycoproteomic mass spectrometry technique. In some embodiments, following admixing with the blood-derived sample: the clotting co-factor comprises Ca2+ at a concentration of about 5 mM to about 25 mM; the clotting enzyme comprises thrombin at a concentration of about 1 unit/mL to 10 units/mL; and the clotting activator and/or the exogenous surface aggregation agent is in an amount of about 50 μg to about 500 μg per 40 μL of the blood-derived sample.

[0125] In certain aspects, provided herein is a defibrination composition comprising: a clotting co-factor; a clotting enzyme; and a clotting activator and/or an exogenous surface aggregation agent.

[0126] In certain aspects, provided herein is a vessel (such as a sample tube) comprising any defibrination composition described herein.

### Section 7—Methods and Systems for Analyzing Site-Specific Monomer Composition

[0127] Aspects of the present disclosure are based, at least in part, on the development of methods and systems for analysis of site-specific glycan monomer composition, as well as on the discovery that such analysis can be used to predict, diagnose, prognose, and/or inform treatment of one or more disease states such as melanoma. Accordingly, aspects of the disclosure are directed to methods for analyzing a set of peptide structures for calculating one or more monomer weight scores. Also disclosed are methods for classifying a biological sample comprising analyzing monomer weight scores to generate a disease indicator and generating a diagnosis or prognosis output based on the disease indicator. Further disclosed are treatment methods comprising treatment of a melanoma subject with immunotherapy (e.g., immune checkpoint blockade therapy such as ipilimumab, nivolumab, and/or pembrolizumab) based on analysis of monomer weight scores from a biological sample from the subject.

[0128] Disclosed herein, in some aspects, is a method for analyzing a set of peptide structures comprising a linking site, the method comprising: A) calculating a site occupancy score, for a given peptide structure at the linking site, as a function of an adjusted-raw abundance value for the given peptide structure and a sum of a set of adjusted-raw abundance values of the set of peptide structures; and B) calculating a monomer weight score as a sum of the site occupancy score and a multiplier, wherein the multiplier is the number of a specific monomer in the set of peptide structures at the linking site. In some aspects, the method further comprises, prior to (A), receiving a set of raw abundance values of the set of peptide structures and normalizing the set of raw abundance values to a corresponding reference run to generate the set of adjusted-raw abundance values. In some aspects, the method further comprises, prior to (B), calculating a peptide structure monomer weight score as a function of the site occupancy score and the number of a specific monomer for the given peptide structure. In some aspects, the monomer weight score is a function of the peptide structure monomer weight score and the site occupancy score. In some aspects, the set of peptide structures is from a biological sample from a subject. In some aspects, the biological sample comprises serum or plasma samples. In some aspects, the reference run comprises serum or plasma samples. In some aspects, the method further comprises correlating the monomer weight score with an indication or disease state to determine a hazard ratio for the indication or disease state, wherein the hazard ratio is used to update a risk profile of the subject for the indication or disease state. In some aspects, the method further comprises generating a diagnosis output for the indication or disease state for the subject, using a predictive model, as a function of the monomer weight score, wherein the diagnosis output is one of a predictive probability or a risk score. In some aspects, further comprising calculating a site occupancy score, for a given peptide structure at the linking site, as the quotient of the adjusted-raw abundance value for the given peptide structure over the sum of the set of adjusted-raw abundance values. In some aspects, the method further comprises calculating a peptide structure monomer weight score as a product of the site occupancy score and the number of specific monomers for the given peptide structure. In some aspects, the method further comprises calculating a monomer weight score for the subject as a sum of peptide structure monomer weight scores for each peptide structure at the linking site. In some aspects, the method further comprises generating a diagnosis output, based on the monomer weight score, for an indication or disease state, wherein the diagnosis output classifies the biological sample as evidencing a state associated with a disease state progression and/or responsiveness to a specific therapy. In some aspects, the set of raw abundance values is generated using multiple reaction monitoring mass spectrometry (MRM-MS). In some aspects, the method further comprises generating a diagnosis output based on the monomer weight score for an indication or disease state, and generating a treatment output based on at least one of the diagnosis output. In some aspects, the treatment output comprises at least one of an identification of a treatment to treat the subject or a treatment plan. In some aspects, the treatment comprises at least one of radiation therapy, chemoradiotherapy, surgery, immunotherapy, hormone therapy, or a targeted drug therapy. In some aspects, the treatment comprises immunotherapy, wherein the immunotherapy is immune checkpoint blockade therapy. In some aspects, the immune checkpoint blockade therapy comprises ipilimumab, nivolumab, and/or pembrolizumab. In some aspects, the method further comprises generating a diagnosis output, wherein generating the diagnosis output comprises: generating a report identifying that the biological sample evidences the indication or disease state. In some aspects, the specific monomer is selected from the group consisting of hexose, HexNac, fucose, and sialic acid. In some aspects, the specific monomer is selected from the group consisting of glucose, mannose, galactose, GlcNAc, GalNAc, fucose, NeuGc, and NeuAc. In some aspects, the method further comprises calculating a second monomer weight score as a sum of the site occupancy score and a second multiplier, wherein the second multiplier is the number of a second monomer in the set of peptide structures at the linking site, wherein the second monomer is different from the specific monomer. In some aspects, the method further comprises calculating a plurality of additional monomer weight scores as functions of the site occupancy score and a plurality of additional multipliers, wherein the plurality of additional multipliers are the number of a plurality of additional monomers in the set of peptide structures at the linking site.

[0129] Disclosed herein, in some aspects, is a method of classifying a biological sample with respect to risk of melanoma progression and/or responsiveness to immune checkpoint inhibitor therapy, the method comprising: A) analyzing one or more monomer weight scores of a set of peptide structures from a biological sample from the subject using a machine learning model to generate a disease indicator; and B) generating a diagnosis output based on the disease indicator that classifies the biological sample as evidencing a state associated with melanoma progression and/or responsiveness to immune checkpoint inhibitory therapy. In some aspects, the method further comprises receiving a set of raw abundance values of the set of peptide structures and normalizing the set of raw abundance values to a corresponding reference run to generate the set of adjusted-raw abundance values. In some aspects, the method further comprises calculating a site occupancy score, for a given peptide structure at the linking site, as the function of the adjusted-raw abundance value for the given peptide structure and the sum of the set of adjusted-raw abundance values. In some aspects, the method further comprises calculating a site occupancy score, for a given peptide structure at the linking site, as the quotient of the adjusted-raw abundance value for the given peptide structure over the sum of the set of adjusted-raw abundance values calculating a peptide structure monomer weight score as a function of the site occupancy score and the number of specific monomers for the given peptide structure. In some aspects, the method further comprises calculating a peptide structure monomer weight score as a product of the site occupancy score and the number of specific monomers for the given peptide structure. In some aspects, the method further comprises calculating a monomer weight score of the one or more monomer weight scores as a sum of peptide structure monomer weight scores for each peptide structure at the linking site. In some aspects, the set of peptide structures comprises post translationally modified (PTM) peptides and/or non-PTM peptides. In some aspects, the monomer is selected from the group consisting of hexose, HexNac, fucose, and sialic acid. In some aspects, the monomer is selected from the group consisting of glucose, mannose, galactose, GlcNAc, GalNAc, fucose, NeuGc, and NeuAc. In some aspects, the set of peptides structures comprises glycosylated peptides and non-glycosylated peptides. In some aspects, the biological sample comprises serum or plasma samples. In some aspects, the reference run comprises serum or plasma samples. In some aspects, the method further comprises treating the biological sample to form a prepared sample comprising the set of peptide structures, the set of peptide structures comprising a set of post translationally modified (PTM) peptides and/or non-PTM peptides; detecting a set of product ions associated with each structure of the set of post translationally modified (PTM) peptides and/or non-PTM peptides, and generating the set of raw abundance values for the set of product ions. In some aspects, the analyzing further comprises: correlating the monomer weight score with a melanoma disease state to determine a hazard ratio for the melanoma disease state, wherein the hazard ratio is used to update a risk profile of the subject for the melanoma disease state. In some aspects, the method further comprises generating a diagnosis output based on the disease indicator that classifies the biological sample as evidencing a state associated with melanoma progression and/or responsiveness to immune checkpoint inhibitory therapy, wherein the diagnosis output is one of a predictive probability or a risk score. In some aspects, the set of raw abundance values is generated using multiple reaction monitoring mass spectrometry (MRM-MS). In some aspects, the method further comprises generating a treatment output based on at least one of the diagnosis output. In some aspects, the treatment output comprises at least one of an identification of a treatment to treat the subject or a treatment plan. In some aspects, the treatment comprises at least one of radiation therapy, chemoradiotherapy, surgery, hormone therapy, or a targeted drug therapy. In some aspects, generating the diagnosis output comprises: generating a report identifying that the biological sample evidences the indication or disease state. In some aspects, the one or more monomer weight scores correspond to at least one site monomer identified in Table 16. In some aspects, the one or more monomer weight scores correspond to at least one site monomer identified in Table 17. In some aspects, the one or more monomer weight scores correspond to at least one site monomer identified in Table 18. In some aspects, the method further comprises training the at least one supervised machine learning model using training data, wherein the training data comprises a plurality of peptide structure profiles for a plurality of subjects and a plurality of subject diagnoses for the plurality of subjects. In some aspects, the plurality of subject diagnoses is selected from the group consisting of a positive diagnosis for any subject of the plurality of subjects determined to have a melanoma disease state, a negative diagnosis for any subject of the plurality of subjects determined not to have a melanoma disease state, a positive diagnosis for any subject of the plurality of subjects determined to be likely to benefit from immune checkpoint inhibitory therapy, and a negative diagnosis for any subject of the plurality of subjects determined to be unlikely to benefit from immune checkpoint inhibitory therapy. In some aspects, the plurality of subjects are separated into classes of positive and negative diagnoses using a concordance index as a cutoff between positive and negative diagnoses. In some aspects, the method further comprises performing a differential expression analysis using the training data to compare a first portion of the plurality of subjects with the positive diagnosis for melanoma disease state or subjects unlikely to benefit from immune checkpoint inhibitory therapy, versus a second portion of the plurality of subjects having the negative diagnosis for melanoma disease state or subjects likely to benefit from immune checkpoint inhibitory therapy; and identifying a training group of peptide structures based on the differential expression analysis for use as prognostic markers for the melanoma disease state and/or responsiveness to immune checkpoint inhibitory therapy; and forming the training data based on the training group of peptide structures identified. In some aspects, the at least one supervised machine learning model comprises a logistic regression model, and wherein the at least one supervised learning model compares the negative diagnosis versus the positive diagnosis, wherein the comparison can be at least one non-melanoma state vs at least one melanoma state, or the comparison can be at least one positive response to immune checkpoint inhibitory therapy vs at least one negative response to immune checkpoint inhibitory therapy.

[0130] Disclosed herein, in some aspects, is a method of treating melanoma in a subject, the method comprising: A) analyzing one or more monomer weight scores corresponding to at least one site monomer identified in Table 16 using a machine learning model to generate a diagnosis output that classifies the biological sample as evidencing a state associated with melanoma progression, and B) administering a therapeutically effective amount of a treatment for melanoma. In some aspects, the method further comprises receiving a set of raw abundance values of the set of peptide structures and normalizing the set of raw abundance values to a corresponding reference run to generate the set of adjusted-raw abundance values. In some aspects, the method further comprises calculating a site occupancy score, for a given peptide structure at the linking site, as the function of the adjusted-raw abundance value for the given peptide structure and the sum of the set of adjusted-raw abundance values. In some aspects, the method further comprises calculating a site occupancy score, for a given peptide structure at the linking site, as the quotient of the adjusted-raw abundance value for the given peptide structure over the sum of the set of adjusted-raw abundance values. In some aspects, the method further comprises calculating a peptide structure monomer weight score as a function of the site occupancy score and the number of specific monomers for the given peptide structure. In some aspects, the method further comprises calculating a peptide structure monomer weight score as a product of the site occupancy score and the number of specific monomers for the given peptide structure. In some aspects, the method further comprises calculating the a monomer weight score of the one or more monomer weight scores as a sum of peptide structure monomer weight scores for each peptide structure at the linking site. In some aspects, the set of peptide structures comprises post translationally modified (PTM) peptides and/or non-PTM peptides. In some aspects, the monomer is selected from the group consisting of hexose, HexNac, fucose, and sialic acid. In some aspects, the monomer is selected from the group consisting of glucose, mannose, galactose, GlcNAc, GalNAc, fucose, NeuGc, and NeuAc. In some aspects, the set of peptides structures comprises glycosylated peptides and non-glycosylated peptides. In some aspects, the biological sample comprises serum or plasma samples. In some aspects, the reference run comprises serum or plasma samples. In some aspects, the method further comprises treating the biological sample to form a prepared sample comprising the set of peptide structures, the set of peptide structures comprising a set of post translationally modified (PTM) peptides and/or non-PTM peptides; detecting a set of product ions associated with each structure of the set of post translationally modified (PTM) peptides and/or non-PTM peptides, and generating the set of raw abundance values for the set of product ions. In some aspects, the analyzing further comprises: correlating the one or more monomer weight scores with a melanoma disease state to determine a hazard ratio for the melanoma disease state, wherein the hazard ratio is used to update a risk profile of the subject for the melanoma disease state. In some aspects, the method further comprises generating a diagnosis output based on a disease indicator that classifies the biological sample as evidencing a state associated with melanoma progression, wherein the diagnosis output is one of a predictive probability or a risk score. In some aspects, the set of raw abundance values is generated using multiple reaction monitoring mass spectrometry (MRM-MS). In some aspects, the treatment comprises at least one of radiation therapy, chemoradiotherapy, immunotherapy, surgery, hormone therapy, or a targeted drug therapy. In some aspects, the treatment comprises immunotherapy, wherein the immunotherapy is immune checkpoint blockade therapy. In some aspects, the immune checkpoint blockade therapy comprises ipilimumab, nivolumab, and/or pembrolizumab. In some aspects, generating the diagnosis output comprises: generating a report identifying that the biological sample evidences the indication or disease state. In some aspects, the one or more monomer weight scores correspond to at least one site monomer identified in Table 17. In some aspects, the one or more monomer weight scores correspond to at least one site monomer identified in Table 18. In some aspects, the method further comprises training the at least one supervised machine learning model using training data, wherein the training data comprises a plurality of peptide structure profiles for a plurality of subjects and a plurality of subject diagnoses for the plurality of subjects. In some aspects, the plurality of subject diagnoses is selected from the group consisting of a positive diagnosis for any subject of the plurality of subjects determined to have a melanoma disease state, a negative diagnosis for any subject of the plurality of subjects determined not to have a melanoma disease state, a positive diagnosis for any subject of the plurality of subjects determined to be likely to benefit from immune checkpoint inhibitory therapy, and a negative diagnosis for any subject of the plurality of subjects determined to be unlikely to benefit from immune checkpoint inhibitory therapy. In some aspects, the plurality of subjects are separated into classes of positive and negative diagnoses using a concordance index as a cutoff between positive and negative diagnoses. In some aspects, the method further comprises performing a differential expression analysis using the training data to compare a first portion of the plurality of subjects with the positive diagnosis for melanoma disease state or subjects unlikely to benefit from immune checkpoint inhibitory therapy, versus a second portion of the plurality of subjects having the negative diagnosis for melanoma disease state or subjects likely to benefit from immune checkpoint inhibitory therapy; and identifying a training group of peptide structures based on the differential expression analysis for use as prognostic markers for the melanoma disease state and/or responsiveness to immune checkpoint inhibitory therapy; and forming the training data based on the training group of peptide structures identified. In some aspects, the at least one supervised machine learning model comprises a logistic regression model, and wherein the at least one supervised learning model compares the negative diagnosis versus the positive diagnosis, wherein the comparison can be at least one non-melanoma state vs at least one melanoma state, or the comparison can be at least one positive response to immune checkpoint inhibitory therapy vs at least one negative response to immune checkpoint inhibitory therapy. Also disclosed is a system comprising one or more data processors; and a non-transitory computer readable storage medium containing instructions which, when executed on the one or more data processors, cause the one or more data processors to perform part or all of a method disclosed herein. Further disclosed is a computer-program product tangibly embodied in a non-transitory machine-readable storage medium, including instructions configured to cause one or more data processors to perform part or all of a method disclosed herein.

[0131] Disclosed herein, in some aspects, is a method of monitoring a subject for a melanoma, the method comprising: receiving first monomer weight score data for a first biological sample obtained from a subject at a first timepoint; analyzing the first monomer weight score data using at least one supervised machine learning model to generate a first disease indicator based on at least one site monomer selected from a group of site monomers identified in Table 16, wherein the group of site monomers in Table 16 comprises a group of site monomers having monomer weight scores associated with melanoma; receiving second monomer weight score data of a second biological sample obtained from the subject at a second timepoint; analyzing the second monomer weight score data using the at least one supervised machine learning model to generate a second disease indicator based on the at least one site monomer selected from the group of site monomers identified in Table 16; and generating a diagnosis output based on the first disease indicator and the second disease indicator. In some aspects, generating the diagnosis output comprises: comparing the second disease indicator to the first disease indicator. In some aspects, the first disease indicator indicates that the first biological sample evidences a negative diagnosis for melanoma and the second biological sample evidences a positive diagnosis for melanoma. In some aspects, the first disease indicator indicates that the first biological sample evidences a melanoma that is not responsive to immunotherapy and the second biological sample evidences a melanoma that is responsive to immunotherapy. In some aspects, the at least one supervised machine learning model comprises a logistic regression model, and wherein the at least one supervised learning model compares negative diagnoses versus positive diagnoses, wherein the comparison can be at least one healthy state versus melanoma generally, healthy state versus immunotherapy responsive melanoma, or immunotherapy nonresponsive melanoma versus immunotherapy responsive melanoma. In some aspects, the at least one site monomer comprises at least one site monomer identified in Table 18. In some aspects, the at least one site monomer comprises at all site monomers identified in Table 18.

[0132] Disclosed herein, in some aspects, is a method of treating melanoma in a subject, the method comprising: determining a monomer weight score for at least one site monomer identified in Table 16 in a biological sample from the subject using a multiple reaction monitoring mass spectrometry (MRM-MS) system; analyzing the monomer weight score using at least one machine learning model to generate a disease indicator; generating a diagnosis output based on the disease indicator that classifies the biological sample as evidencing that the patient has melanoma; and administering to the subject a therapeutically effective amount of a melanoma therapy.

[0133] Disclosed herein, in some aspects, is a method of treating melanoma in a subject, the method comprising: determining a monomer weight score for at least one site monomer identified in Table 16 in a biological sample from the subject using a multiple reaction monitoring mass spectrometry (MRM-MS) system; analyzing the monomer weight score using at least one machine learning model to generate a disease indicator; generating a diagnosis output based on the disease indicator that classifies the biological sample as evidencing that the melanoma is sensitive to immunotherapy; and administering to the subject a therapeutically effective amount of immunotherapy.

[0134] Disclosed herein, in some aspects, is a method of treating melanoma in a subject, the method comprising: determining a monomer weight score for at least one site monomer identified in Table 16 in a biological sample from the subject using a multiple reaction monitoring mass spectrometry (MRM-MS) system; analyzing the monomer weight score using at least one machine learning model to generate a disease indicator; generating a diagnosis output based on the disease indicator that classifies the biological sample as evidencing that the melanoma is sensitive to immunotherapy; and administering to the subject a therapeutically effective amount of immunotherapy.

[0135] Disclosed herein, in some aspects, is a method of predicting a risk for melanoma in a subject, the method comprising: determining a monomer weight score for at least one site monomer identified in Table 16 in a biological sample from the subject using a multiple reaction monitoring mass spectrometry (MRM-MS) system; analyzing the monomer weight score using at least one machine learning model to generate a disease indicator; and generating a diagnosis output based on the disease indicator that classifies the biological sample as evidencing that the patient has a risk for melanoma.

[0136] Disclosed herein, in some aspects, is a method of predicting immunotherapy sensitivity, the method comprising: determining a monomer weight score for at least one site monomer identified in Table 16 in a biological sample from the subject using a multiple reaction monitoring mass spectrometry (MRM-MS) system; analyzing the monomer weight score using at least one machine learning model to generate a disease indicator; and generating a diagnosis output based on the disease indicator that classifies the biological sample as evidencing that the patient has a risk for melanoma.

[0137] In one aspect, a system is described according to various embodiments. In various embodiments, the system comprises one or more data processors and a non-transitory computer readable storage medium containing instructions which, when executed on the one or more data processors, cause the one or more data processors to perform part or all of any one or more of the methods described herein.

[0138] In one aspect, disclosed is a computer-program product tangibly embodied in a non-transitory machine-readable storage medium, including instructions configured to cause one or more data processors to perform part or all of any one or more of the methods described herein.

### Section 8—Predicting Peptide Retention Time in Mass Spectrometry

[0139] In some embodiments, methods for predicting retention times of peptides include: accessing a feature set corresponding to a peptide, wherein the feature set represents peptide sequence data of the peptide and corresponding physicochemical features; sending the feature set as an input into a neural network, the neural network comprising: (1) a plurality of 1DCNN layers, (2) one or more BiLSTM layers, and (3) a multi-head attention layer; and obtaining, as an output from the neural network, a predicted retention time for the peptide corresponding to an estimated retention time for the peptide in a liquid chromatography mass spectrometry (LC-MS) run. Systems and media may be configured to perform the disclosed methods.

[0140] In some embodiments, the neural network may further comprise a flatten and dense layer as a final output layer. In some embodiments, the feature set for a peptide is generated by: encoding a peptide sequence of the peptide to generate a matrix representation of the peptide; compressing the matrix representation to a vector representation; and concatenating, to the vector representation, one or more corresponding physiochemical features that are determined to be associated with the peptide or peptide sequence. In some embodiments, generating the feature set further comprises normalizing the concatenated vector representation between 0 and 1.

[0141] In some embodiments, the peptide sequence data is encoded using one-hot encoding. In these embodiments, the matrix representation may comprise: 20 columns corresponding to 20 unique amino acids, and n rows, wherein each row corresponds to a position in a sequence of the corresponding peptide, and wherein n corresponds to a length of the corresponding peptide.

[0142] In some embodiments, the peptide sequence data is encoded using BLOSUM 62. In these embodiments, the encoding may generate a matrix comprising: 20 columns corresponding to 20 unique amino acids; 3 columns corresponding to 3 special amino acid characters; 1 column corresponding to a translation stop.

[0143] In some embodiments, methods for training a neural network for predicting retention times of peptides include: accessing a plurality of feature sets corresponding to a plurality of peptides, wherein the feature set represents peptide sequence data of the peptide and corresponding physicochemical features; creating a training set comprising a subset of feature sets from the plurality of feature sets; and training a neural network using the training set, the neural network comprising: (1) a plurality of 1DCNN layers, (2) one or more BiLSTM layers, and (3) a multi-head attention layer. Systems and media may be configured to perform the disclosed methods.

[0144] In some embodiments, the training may further include creating a validation set comprising a subset of feature sets from the plurality of feature sets; sending the validation set through the neural network; and evaluating the outputs. In some embodiments, the training set comprises 80% of the plurality of feature sets and the validation set comprises 30% of the plurality of feature sets.

### BRIEF DESCRIPTION OF THE DRAWINGS

[0145] FIGS. 1A-1C show schematics describing exemplary mass spectrometry-related workflows. FIG. 1A shows a schematic of an example mass spectrometry workflow, from sample collection to data analysis, for glycoproteins. FIG. 1B shows a schematic of certain proteolytic digestion method steps, including denaturation, reduction, alkylation, and proteolytic digestion. FIG. 1C shows a schematic of an example analysis system, including aspects directed to quantification, quality control, and peak integration and data normalization.

[0146] FIGS. 2A and 2B show Coomassie stained gel of sample digested with different proteolytic techniques.

[0147] FIGS. 3A and 3B show schematics of liquid chromatography systems for sample loading and diversion to waste (FIG. 3A) and sample elution to the mass spectrometer (MS; FIG. 3B).

[0148] FIG. 4 shows peak area plots for two glycopeptides as measured (i) without a desalting step and with a chromatographic diversion step, and (ii) with a desalting step.

[0149] FIG. 5 shows a plot of the measured false discovery rate of various glycopeptides both (i) without a desalting step and with a chromatographic diversion step, and (ii) with a desalting step.

[0150] FIG. 6 shows a plot of peak areas of a species of a glycopeptide measured from sample digestions performed using different amounts of trypsin.

[0151] FIGS. 7A and 7B show unity plots comparing various lots and protease configurations for serum samples.

[0152] FIGS. 8A and 8B show unity plots comparing various lots and protease configurations for plasma samples.

[0153] FIGS. 9A and 9B show unity plots comparing reduction techniques.

[0154] FIG. 10 shows a plot of signal response relative to protease quenching time using formic acid.

[0155] FIG. 11A shows a plot of CV % of detected peak area from analyses of peptides and glycopeptides performed using specified techniques and sample loading amounts. FIGS. 11B and 11C show plots of log₂ difference for sialyated glycopeptide species having the specified number of terminal sialic acid moieties as assessed for specified sample loading amounts.

[0156] FIGS. 12A and 12B show plots of CV % for a control (C) workflow and workflows 1-7 for non-glycosylated peptides (FIG. 12A) and glycopeptides (FIG. 12B). FIGS. 12C and 12D show unity plots comparing various workflows.

[0157] FIGS. 13A and 13B show plots of log₂ difference for sialyated glycopeptide species having the specified number of terminal sialic acid moieties as assessed via an AssayMap C18 clean-up taught herein using a 60 μg sample loading amount (FIG. 13A) and an AssayMap RP-S sample clean-up taught herein using a 60 μg sample loading amount (FIG. 13B).

[0158] FIG. 14A shows a schematic of an absorbent or bibulous member, such as a blood spot card 1400. FIG. 14B shows a schematic of an absorbent or bibulous member comprising a lateral flow element 1450.

[0159] FIG. 15A shows the correlation comparison of peptide abundance for venipuncture serum (HuSer) and finger-prick capillary serum processed from capillary blood (HuCSer). FIG. 15B shows the associated CV values for this same data set.

[0160] FIG. 16A shows the correlation comparison of peptide abundance for finger-prick capillary serum (HuCSer) and serum separated from finger-prick blood on Hema Spot membrane (HEMA) and FIG. 16B shows the correlation comparison of peptide abundance for venipuncture serum (HuSer) and serum dried on a dried blood spot card (DSS). FIG. 16C shows the associated CV values HEMA and DSS from this same data set.

[0161] FIG. 17A shows the CV comparison for DBS extracted samples and capillary serum processed samples of the clinical trial patient samples. FIGS. 17B and 17C show the correlation of peptide abundance for DBS extracted samples and serum processed samples for a benign pelvic tumor subject (#11) and malignant tumor subject (#26).

[0162] FIG. 17D shows PCA clustering of DBS and serum results, wherein each analysis demonstrates the ability to discriminate between benign samples and malignant samples.

[0163] FIG. 18 shows the correlation between serum and DBS of glycopeptides and peptides.

[0164] FIG. 19 shows a workflow schematic of certain aspects of mass spectrometry-based methodology relevant to the methods taught herein.

[0165] FIG. 20 shows a workflow schematic of certain aspects of mass spectrometry-based methodology relevant to the methods taught herein.

[0166] FIG. 21 shows a plot of coefficient of variation (CV) from an LC-MS analysis of a 1ss and 2ss serum sample.

[0167] FIG. 22 shows a plot of the ratio signal from glycopeptides (AUC) over peptides identified from the same proteins as the identified glycopeptides (AUC) from an LC-MS analysis of a 1ss and 2ss serum sample

[0168] FIG. 23 shows a plot of coefficient of variation (CV) from an LC-MS analysis of samples obtained using 80% ACN and 70% ACN HILIC load conditions.

[0169] FIG. 24 shows a plot of peak area measurements for a glycopeptide (ATL3_1330_5402-366.1000+) from replicates without HILIC enrichment and a HILIC processing technique taught herein.

[0170] FIG. 25 shows a plot of peak area measurements for an unglycosylated peptide (TGLQEVENVK) from replicates without HILIC enrichment and a HILIC processing technique taught herein.

[0171] FIG. 26 shows a workflow schematic of certain aspects of mass spectrometry-based methodology relevant to the methods taught herein.

[0172] FIG. 27 shows an exemplary workflow for defibrination treatment of plasma samples.

[0173] FIG. 28 shows fibrinogen concentration of Na-citrated plasma samples that have been treated with defibrination reagents quantified via a human fibrinogen ELISA assay.

[0174] FIG. 29 shows fibrinogen concentration of a variety of different plasma type samples that have been treated with defibrination reagents quantified via a human fibrinogen ELISA assay.

[0175] FIG. 30 shows the average relative abundance quantified via LC-MS of A, B, and G fibrinogen peptides for different Na-citrated plasma samples that have been treated with defibrination reagents.

[0176] FIGS. 31A and 31B shows a correlation plot of log 2 (abundance) of peptide structures quantified via LC-MS between C-T-K treated defibrinated plasma vs. each of mock treated serum (FIG. 31A) and mock treated plasma (FIG. 31B).

[0177] FIG. 32 shows a correlation plot of log₂ (abundance) of peptide structures quantified via LC-MS between C-K treated defibrinated plasma vs. mock treated serum.

[0178] FIG. 33 shows a correlation plot of log₂ (abundance) of peptide structures quantified via LC-MS between C treated defibrinated plasma vs. mock treated serum.

[0179] FIG. 34 shows a correlation plot of log₂ (abundance) of peptide structures quantified via LC-MS between T treated defibrinated plasma vs. mock treated serum.

[0180] FIG. 35 shows fibrinogen concentration of a variety of different plasma type samples that have been treated with defibrination reagents, including silica particles, quantified via a human fibrinogen ELISA assay.

[0181] FIG. 36 is a flowchart of a process for analyzing a set of peptide structures in a biological sample in accordance with one or more embodiments.

[0182] FIG. 37 is a flowchart of a process for classifying a biological sample with respect to risk of melanoma progression and/or responsiveness to immune checkpoint inhibitor therapy in accordance with one or more embodiments.

[0183] FIG. 38 is a flowchart of a process for treating melanoma in a subject in accordance with one or more embodiments.

[0184] FIG. 39 is a flowchart of a process for monitoring a subject for melanoma in accordance with one or more embodiments.

[0185] FIG. 40 is a schematic example of a process for determining a monomer weight score.

[0186] FIG. 41 is a hazard ratio plot showing hazard ratios for each shown site monomer with regards to progression free survival (PFS) in melanoma patients. Filled in diamonds indicate site monomers corresponding to hazard ratios having FDR<0.05.

[0187] FIG. 42 is a Kaplan-Meier curve showing progression-free survival of patients in the training cohort characterized as more likely to benefit from immunotherapy or less likely to benefits from immunotherapy, determined based on monomer weight features CFAH_882_fuco and HPT_184_fuco.

[0188] FIG. 43 is a Kaplan-Meier curve showing progression-free survival of patients in the validation cohort characterized as more likely to benefit from immunotherapy or less likely to benefits from immunotherapy, determined based on site monomers CFAH_882_fuco and HPT_184_fuco.

[0189] FIG. 44 is a Kaplan-Meier curve showing progression-free survival of patients in the test cohort characterized as more likely to benefit from immunotherapy or less likely to benefits from immunotherapy, determined based on site monomers CFAH_882_fuco and HPT_184_fuco.

[0190] FIG. 45 is a hazard ratio plot showing hazard ratios for each shown site monomer with regards to progression free survival (PFS) in melanoma patients. Filled in diamonds indicate site monomers corresponding to hazard ratios having FDR<0.05.

[0191] FIG. 46A shows Kaplan-Meier curves of various event occurrences in the discovery cohort.

[0192] FIG. 46B shows Kaplan-Meier curves of OS and censoring distributions in the discovery and external validation cohorts.

[0193] FIG. 47A to 47E show Kaplan-Meier curves stratified by classifier prediction where FIG. 47A-D are for the discovery cohort and FIG. 47E are for the external validation cohort.

[0194] FIG. 48A to 48E show that fucosylation signatures in peripheral blood N-glycoproteins are associated with reduced clinical benefit. FIGS. 48A1 and 48A2 are charts of glycopeptides with differential expression, based on relative abundance measurements, in responders compared to non-responders (p<0.05) were classified based on the glycan structure (FIG. 48A1 for fucose and FIG. 48A2 for sialic acid). N-linked glycopeptides separated in two groups based on the presence or absence of fucose that strongly associated with response to treatment (p<0.0001), whereas the number of sialic acid residues did not associate with response. HR, hazard ratio. FIG. 48B shows a chart indicating that di-sialylated O-glycopeptides are enriched in samples with reduced survival (p=0.14). FIG. 48C is a chart showing the effect of site occupancy on protein function in relation to treatment. Lack of a glycan on site N70 of alpha1-antitrypsin (A1AT_N70 NG) is associated with favorable response, whereas absence of glycosylation at the site N1424 of alpha2-microglobulin is associated with poorer responses. The 4-digit number describes glycans composition (number of hexoses, HexNAc, fucose and sialic acid, respectively). FIG. 48D is a chart of hazard ratios of 51 fucose-specific monomer weight features derived from N-glycopeptides sorted by age- and sex-adjusted Cox regression FDR. Hazard ratios of features that achieved FDR<0.05 are filled-in diamonds. FIG. 48E1 to 48E4 show four Kaplan-Meier curves showing performance of repeated five-fold cross-validated LASSO-regularized Cox regression-based classifier using 11 fucose-specific features derived from N-glycopeptides that achieved FDR<0.05 in age- and sex-adjusted Cox regression analysis.

[0195] FIG. 49A to 49D show Kaplan-Meier curves of OS in the discovery cohort stratified by melanoma subtype (FIG. 49A), LDH category (FIG. 49B), ECOG performance status (FIG. 49C), and BRAF status (FIG. 49D), respectively.

[0196] FIGS. 50A and 50B show Kaplan-Meier curves stratified by early failure (EF, progression and death within 6 months of treatment start, n=40) and sustained controls (SC, progression and death-free beyond 3 years of treatment; n=56) in the discovery cohort. “Other” defines intermediate phenotypes (n=106). FIG. 50A has PFS on the y-axis and FIG. 50B has OS on the y-axis.

[0197] FIG. 51A to 51C show Kaplan-Meier curves in the full discovery cohort stratified by classifier prediction and one of LDH category (FIG. 51A), ECOG performance status (FIG. 51B), and BRAF status (FIG. 51C).

[0198] FIG. 52 illustrates an example workflow for generating training sets for training a machine learning model for predicting retention times for peptides.

[0199] FIG. 53 illustrates the retention time distribution of a particular peptide from serum using the workflow illustrated in FIG. 52.

[0200] FIG. 54 illustrates an example LC-MS workflow and data extraction steps that may be employed.

[0201] FIG. 55 illustrates an example workflow for predicting retention times based on human serum samples as described herein.

[0202] FIG. 56 illustrates a number of different architectures that were attempted for creating a model for predicting peptide retention times.

[0203] FIGS. 57A-57B illustrate plots of R2 and R2 Adjusted scores received using the various architectures noted in FIG. 56.

[0204] FIG. 58A illustrate an example method for predicting a retention time for a peptide.

[0205] FIG. 58B illustrates an example method for training a neural network configured to predict retention times of peptides.

[0206] FIG. 59 illustrates an example computer system that may be used to perform one or more steps of one or more methods described or illustrated herein.

[0207] FIG. 60 is a block diagram of an analysis system in accordance with one or more embodiments.

[0208] FIG. 61 is a block diagram of a computer system in accordance with various embodiments.

### DETAILED DESCRIPTION

[0209] Provided herein, in certain aspects, are methods for proteolytically digesting a biological sample comprising a glycoprotein to produce one or more proteolytic glycopeptides, wherein the method comprises use of a thermal denaturation technique. In other aspects, provided herein are methods of performing a liquid chromatography-mass spectrometry (LC-MS) analysis of one or more proteolytic glycopeptides derived from a sample comprising a glycoprotein, including using the proteolytic digestion techniques described herein, wherein the LC-MS technique comprises use of a buffer salt or salt diversion step to eliminate the need for any other online or offline desalting steps. A buffer salt is a salt that is generally resistant to pH change whereas a salt can more generally be any charged ionic species that can potentially contaminate a MS. The disclosure of the present application is based on the inventors' unique perspective and unexpected findings regarding proteolytic digestion techniques and LC-MS techniques providing an improved analysis of glycoproteins and glycopeptides. Specifically, as taught herein, it was unexpectedly found that the use of a thermal denaturation technique enabled more complete digestion of a sample containing glycoproteins. Such thermal denaturation techniques can be performed with control of the temperature of a sample container lid to reduce sample loss via condensation, thereby allowing for improved quantification accuracy and reproducibility. The thermal denaturation techniques developed by the inventors can be performed in a thermocycler, which improves accuracy, reproducibility, and automation of the methods taught herein. Moreover, the resulting proteolytically digested sample was compatible with downstream LC-MS techniques comprising a buffer salt or salt diversion step. Reversed-phase liquid chromatography techniques are well suited to the hydrophilic-hydrophobic characteristic range of non-glycosylated polypeptides, and find use in sample clean-up steps and in chromatography to separate polypeptide species introduced to a mass spectrometer. Typically, polypeptide species have sufficient hydrophobicity to bind to sample phase extraction material based on C18 allowing for a simple desalting step. However, in some embodiments, the glycan structure of a glycopeptide can dramatically adjust the overall behavior of a glycopeptide on a reversed-phase material (e.g., C18) as compared to the non-glycosylated version of the glycopeptide. For example, glycopeptides comprising one or more sialic acid moieties have an increased hydrophilic characteristic and are often lost in conventional desalting techniques because they do not efficiently bind to reverse phase materials. In addition, the use of surfactants for helping digestion can also contribute to the decomposition of sialic acids. Typically, the surfactant needs to be removed from proteolytic digests with a solid phase extraction material before injection into a LC-MS and the acid eluting conditions cause sialic acid decomposition. Such loss results in decreased accuracy of results and quantification. The LC-MS techniques taught herein eliminate the need to perform independent desalting steps, and instead use a buffer salt or salt diversion step during the LC-MS technique to reduce salts introduced to the mass spectrometer while reducing glycopeptides lost due to sample handling. It is worthwhile to note that relatively higher salt concentration can cause a need to perform more frequent maintenance with a MS system where the salt residue needs to be removed through a cleaning process. This cleaning process reduces the overall sample throughput with a MS system since it will be inoperable during the maintenance process. In summary, the methods taught herein provide surprising improvements in the degree of completion of proteolytic digestion, capture of a broader class of glycopeptides that can then be analyzed by the mass spectrometer, reduced biasing of identified and quantified glycopeptides, and improved reproducibility. Such results represent a significant advancement in the ability to use glycoproteins in the study of human physiology.

[0210] Thus, in some aspects, provided herein is a method for performing a liquid chromatography-mass spectrometry analysis of a proteolytic glycopeptide derived from a biological sample comprising a glycoprotein, the method comprising: subjecting the biological sample to a thermal denaturation technique to produce a denatured sample followed by a proteolytic digestion technique to produce a proteolytically digested sample comprising the glycopeptide, wherein the thermal denaturation technique subjects the biological sample to a thermal cycle comprising a thermal treatment of about 60° C. to about 100° C., such as about 90° C. to about 100° C., with a hold time of at least about 1 minute, wherein the lid temperature during the thermal cycle is at least about 2° C. higher than the temperature of the block temperature during the thermal cycle, wherein the proteolytic digestion technique comprises adding an amount of one or more proteolytic enzymes and incubating for a digestion incubation time, and wherein the digestion technique comprises quenching the one or more proteolytic enzymes following the digestion incubation time; introducing the proteolytically digested sample to a liquid chromatography (LC) system of a LC-MS system; and performing a LC separation to introduce the proteolytic glycopeptide to a mass spectrometer (MS) system, wherein the LC separation comprises a period of diversion of an initial eluate comprising a buffer salt or salt, and wherein the LC system comprises a reversed-phase chromatography column.

[0211] In other aspects, provided herein is a method for proteolytically digesting a biological sample comprising a glycoprotein to produce a proteolytic glycopeptide, the method comprising: subjecting the biological sample to a thermal denaturation technique to produce a denatured sample, wherein the thermal denaturation technique comprises subjecting the biological sample to a thermal cycle comprising a thermal treatment of about 60° C. to about 100° C. with a hold time of at least about 1 minute, wherein the lid temperature during the thermal cycle is at least about 2° C. higher than the temperature of the block temperature during the thermal cycle; subjecting the denatured sample to a reduction technique to produce a reduced sample, wherein the reduction technique comprises adding an amount of a reducing agent to the denatured sample and incubating for a reducing incubation time; subjecting the reduced sample to an alkylation technique to produce an alkylated sample, wherein the alkylation technique comprises adding an amount of an alkylating agent to the reduced sample and incubating substantially in the dark or in a low light condition for an alkylation incubation time, and wherein the alkylated technique comprises quenching the alkylating agent following the alkylation incubation time; and subjecting the alkylated sample to a proteolytic digestion technique to produce a proteolytically digested sample comprising the proteolytic glycopeptide, wherein the proteolytic digestion technique comprises adding an amount of one or more proteolytic enzymes and incubating for a digestion incubation time, and wherein the proteolytic digestion technique comprises quenching the one or more proteolytic enzymes following the digestion incubation time.

[0212] The embodiments described herein recognize that glycoproteomics is an emerging field that can be used in the overall diagnosis and/or treatment of subjects with various types of diseases. Glycoproteomics aims to determine the positions, identities, and quantities of glycans and glycosylated proteins in a given sample (e.g., blood sample, serum sample, cell, tissue, etc.). Protein glycosylation is one of the most common and most complex forms of post-translational protein modification, and can affect protein structure, conformation, and function. For example, glycoproteins may play crucial roles in important biological processes such as cell signaling, host-pathogen interactions, and immune response and disease. Glycoproteins may therefore be important to diagnosing different types of diseases.

[0213] Although protein glycosylation provides useful information about cancer and other diseases, analysis of protein glycosylation may be difficult as the glycan typically cannot be traced back to the protein site of origin with currently available methodologies. Glycoprotein analysis can be challenging in general due to several reasons. For example, a single glycan composition in a peptide may contain a large number of isomeric structures because of different glycosidic linkages, branching, and many monosaccharides having the same mass. Further, the presence of multiple glycans that share the same peptide sequence may cause the mass spectrometry (MS) signal to split into various glycoforms, lowering their individual abundances compared to the peptides that are not glycosylated (aglycosylated peptides).

[0214] However, to understand various disease conditions and to diagnose and prognose certain diseases, such as melanoma, more accurately, it may be important to perform analysis of glycoproteins and to identify not only the glycan but also the linking site (e.g., the amino acid residue of attachment) within the protein. Thus, there is a need to provide a method for site-specific glycoprotein analysis to obtain detailed information about protein glycosylation patterns that may be able to provide information about a disease state (e.g., a melanoma disease state). This information can be used to distinguish the disease state from other states, diagnose a subject as having or not having the disease state, determine a likelihood that a subject has the disease state, determine the responsiveness of a disease to a particular treatment, or a combination thereof. For example, such analysis may be useful in diagnosing a melanoma disease state for a subject (e.g., a negative diagnosis for the melanoma disease state, a positive diagnosis for the melanoma disease state). Sample collection and analysis can be collected at different time points for comparing melanoma disease states over time for a subject. For example, the negative diagnosis may include a healthy state. An example of the positive diagnosis includes the subject suffering from melanoma. A diagnosis can also assess a malignancy status of a previously identified melanoma. Further, a prognosis can assess whether a melanoma is or is not responsive to (or likely to be responsive to) a particular therapy such as immunotherapy (e.g., immune checkpoint inhibitors such as ipilimumab, nivolumab, and/or pembrolizumab).

[0215] Accordingly, the embodiments described herein provide various methods and systems for analyzing proteins in subjects and, in particular, glycoproteins. In one or more embodiments, one or more machine learning models are trained to analyze peptide structure data, monomer weight data, or a combination thereof and generate a disease indicator that provides information relating to one or more diseases. For example, in various embodiments, the peptide structure data comprises quantification metrics (e.g., abundance or concentration data) for peptide structures. A peptide structure may be defined by an aglycosylated peptide sequence (e.g., a peptide or peptide fragment of a larger parent protein) or a glycosylated peptide sequence. A glycosylated peptide sequence (also referred to as a glycopeptide structure) may be a peptide sequence having a glycan structure that is attached to a linking site (e.g., an amino acid residue) of the peptide sequence, which may occur via, for example, a particular atom of the amino acid residue). Non-limiting examples of glycosylated peptides include N-linked glycopeptides and O-linked glycopeptides. In some aspects, the monomer weight data comprises one or more monomer weight scores for one or more linker sites. One or more monomer weight scores may be used to generate a disease indicator.

[0216] The embodiments described herein recognize that the abundance of one or more monomer type at one or more particular linker sites may be used to determine the likelihood of that subject evidencing a melanoma disease state. Certain peptide structures and monomer weights that are associated with a melanoma disease state may be more relevant to that disease state than other peptide structures that are also associated with that disease state.

[0217] Analyzing the abundance of peptide structures and glycosylated peptide structures in a biological sample, along with the monomer weights obtained from analysis of such peptide structures, may provide a more accurate way in which to distinguish a positive melanoma disease state (e.g., a state including the presence of melanoma) from a negative melanoma disease state (e.g., healthy state, an absence of melanoma, etc.). Additionally or alternatively, the disclosed methods may provide a more accurate way in which to predict the responsiveness of a melanoma to immunotherapy (or other) treatment. This type of analysis may be more conducive to generating accurate diagnoses and/or prognoses as compared to glycoprotein analysis that focuses on analyzing glycoproteins that are too large to be resolved via mass spectrometry. Further, with glycoproteins, there may be too many potential proteoforms to consider. Still further, analysis of peptide structure data in the manner described by the various embodiments herein may be more conducive to generating accurate diagnoses as compared to glycomic analysis that provides little to no information about what proteins and to which amino acid residue sites various glycan structures attach.

[0218] Further, the methods, systems, and compositions provided by the embodiments described herein may enable an earlier, more accurate and/or less invasive diagnosis of melanoma in a subject as compared to currently available diagnostic modalities (e.g., biopsies, imaging, biochemical tests) used for determining whether immunotherapy (e.g., immune checkpoint inhibitors such as ipilimumab, nivolumab, and/or pembrolizumab) is indicated.

[0219] The description below provides exemplary implementations of the methods and systems described herein for analysis of peptide structures and for research, diagnosis, and/or treatment of melanoma. Various examples implement the methods and systems described herein as a screening tool. Descriptions and examples of various terms, as used herein, are provided in the following section.

### A. Definitions

[0220] Unless defined otherwise, all terms of art, notations and other technical and scientific terms or terminology used herein are intended to have the same meaning as is commonly understood by one of ordinary skill in the art to which the claimed subject matter pertains. In some cases, terms with commonly understood meanings are defined herein for clarity and/or for ready reference, and the inclusion of such definitions herein should not necessarily be construed to represent a substantial difference over what is generally understood in the art.

[0221] The terms “polypeptide” and “protein,” as used herein, may be used interchangeably to refer to a polymer comprising amino acid residues, and are not limited to a minimum length. Such polymers may contain natural or non-natural amino acid residues, or combinations thereof, and include, but are not limited to, peptides, polypeptides, oligopeptides, dimers, trimers, and multimers of amino acid residues. Full-length polypeptides or proteins, and fragments thereof, are encompassed by this definition. The terms also include modified species thereof, e.g., post-translational modifications of one or more residues, for example, methylation, phosphorylation glycosylation, sialylation, or acetylation.

[0222] The term “glycoprotein,” as used herein, generally refers to a protein having at least one glycan residue bonded thereto. In some embodiments, a glycopeptide, as used herein, refers to a fragment of a glycoprotein, such as obtained from digestion of the glycoprotein.

[0223] The term “glycopeptide” or “glycopolypeptide” as used herein, generally refer to a peptide or polypeptide comprising at least one glycan residue. In various embodiments, glycopeptides comprise carbohydrate moieties (e.g., one or more glycans) covalently attached to a side chain of an amino acid residue.

[0224] The term “glycopeptide fragment” or “glycosylated peptide fragment” or “glycopeptide” as used herein, generally refers to a glycosylated peptide (or glycopeptide) having an amino acid sequence that is the same as part (but not all) of the amino acid sequence of the glycosylated protein from which the glycosylated peptide is obtained, e.g., ion fragmentation within a MRM-MS instrument. MRM refers to multiple-reaction-monitoring. Unless specified otherwise, within the specification, “glycopeptide fragments” or “fragments of a glycopeptide” refer to the fragments produced directly by using a mass spectrometer optionally after the glycoprotein has been digested enzymatically to produce the glycopeptides.

[0225] The terms “glycan” or “polysaccharide,” as used herein, both generally refer to a carbohydrate residue of a glycoconjugate, such as the carbohydrate portion of a glycopeptide, glycoprotein, glycolipid, or proteoglycan. Glycans can include monosaccharides.

[0226] The term “linking site” or “glycosylation site” (or, in some cases, simply “site”) as used herein generally refers to the location where a sugar molecule of a glycan or glycan structure is directly bound (e.g., covalently bound) to an amino acid of a peptide, a polypeptide, or a protein. For example, the linking site may be an amino acid residue and a glycan structure may be linked via an atom of the amino acid residue. Non-limiting examples of types of glycosylation can include N-linked glycosylation, O-linked glycosylation, C-linked glycosylation, S-linked glycosylation, and glycation.

[0227] The term “amino acid,” as used herein, generally refers to any organic compound that includes an amino group (e.g., —NH2), a carboxyl group (—COOH), and a side chain group (R) which varies based on a specific amino acid. Amino acids can be linked using peptide bonds.

[0228] The term “denaturation,” or grammatical equivalents thereof, as used herein, generally refers to any molecule that loses quaternary structure, tertiary structure, and secondary structure which is present in their native state. Non-limiting examples include proteins or nucleic acids being exposed to an external compound or environmental condition such as acid, base, temperature, pressure, and/or radiation.

[0229] The term “reduction,” or grammatical equivalents thereof, as used herein, generally refers to the gain of an electron by a substance. In various embodiments, reduction may be used to break disulfide bonds between two cysteines.

[0230] The term “alkylation,” or grammatical equivalents thereof, as used herein, generally refers to the transfer of an alkyl group from one molecule to another. In various embodiments, alkylation is used to react with reduced cysteines to prevent the re-formation of disulfide bonds after reduction has been performed.

[0231] The terms “digestion” or “enzymatic digestion,” as used herein, generally refers to a biological process that employs enzymes to break specific amino acid peptide bonds. For example, digesting a peptide includes contacting the peptide with an digesting enzyme, e.g., trypsin to produce fragments of the glycopeptide. In some examples, a protease enzyme is used to digest a glycopeptide. The term “protease” refers to an enzyme that performs proteolysis or breakdown of large peptides into smaller polypeptides or individual amino acids. Examples of a protease include, but are not limited to, one or more of a serine protease, threonine protease, cysteine protease, aspartate protease, glutamic acid protease, metalloprotease, asparagine peptide lyase, and any combinations of the foregoing. Enzymatic digestion may be used in preparation for mass spectrometry using trypsin digestion protocols. Proteins may be digested using other proteases in preparation for mass spectrometry if access is limited to cleavage sites.

[0232] As used herein, an “internal standard,” may refer to something that can be contained (e.g., spiked-in) in the same sample as a target glycopeptide analyte undergoing mass spectrometry analysis. Internal standards can be used for calibration purposes. Additionally, internal standards can be used in the systems and method described herein. In some aspects, an internal standard can be selected based on similarity m/z and or retention times and can be a “surrogate” if a specific standard is too costly or unavailable. Internal standards can be heavy labeled or non-heavy labeled.

[0233] The term “liquid chromatography,” as used herein, generally refers to a technique used to separate a sample into parts, such as spatial separate along a chromatography column. Liquid chromatography can be used to separate, identify, and quantify components.

[0234] The term “mass spectrometry,” as used herein, generally refers to an analytical technique used to identify molecules. In various embodiments described herein, mass spectrometry can be involved in characterization and sequencing of proteins.

[0235] The term “m/z” or “mass-to-charge ratio” as used herein, generally refers to an output value from a mass spectrometry instrument. In various embodiments, m/z can represent a relationship between the mass of a given ion and the number of elementary charges that it carries. The “m” in m/z stands for mass and the “z” stands for charge. In some embodiments, m/z can be displayed on an x-axis of a mass spectrum.

[0236] As used herein, a “transition,” may refer to or identify a peptide structure. In some embodiments, a transition can refer to the specific pair of m/z values associated with a precursor ion and a product or fragment ion.

[0237] The terms “biological sample,” as used herein, generally refers to a specimen taken by sampling so as to be representative of the source of the specimen, typically, from a subject. A biological sample can be representative of an organism as a whole, specific tissue, cell type, or category or sub-category of interest. In some embodiments, the biological sample comprises a glycopolypeptide, such as a glycoprotein.

[0238] The terms “biological sample,” “biological specimen,” or “biospecimen” as used herein, generally refers to a specimen taken by sampling so as to be representative of the source of the specimen, typically, from a subject. A biological sample can be representative of an organism as a whole, specific tissue, cell type, or category or sub-category of interest. Biological samples may include, but are not limited to stool, synovial fluid, whole blood, blood serum, blood plasma, urine, sputum, tissue, saliva, tears, spinal fluid, tissue section(s) obtained by biopsy; cell(s) that are placed in or adapted to tissue culture; sweat, mucous, gastric fluid, abdominal fluid, amniotic fluid, cyst fluid, peritoneal fluid, pancreatic juice, breast milk, lung lavage, marrow, gastric acid, bile, semen, pus, aqueous humor, transudate, and the like including derivatives, portions and combinations of the foregoing. In some examples, biological samples include, but are not limited, to stool, biopsy, blood and/or plasma. In some examples, biological samples include, but are not limited, to urine or stool. Biological samples include, but are not limited, to biopsy. Biological samples include, but are not limited, to tissue dissections and tissue biopsies. Biological samples include, but are not limited, any derivative or fraction of the aforementioned biological samples. The biological sample can include a macromolecule. The biological sample can include a small molecule. The biological sample can include a virus. The biological sample can include a cell or derivative of a cell. The biological sample can include an organelle. The biological sample can include a cell nucleus. The biological sample can include a rare cell from a population of cells. The biological sample can include any type of cell, including without limitation prokaryotic cells, eukaryotic cells, bacterial, fungal, plant, mammalian, or other animal cell type, mycoplasmas, normal tissue cells, tumor cells, or any other cell type, whether derived from single cell or multicellular organisms. The biological sample can include a constituent of a cell. The biological sample can include nucleotides (e.g., ssDNA, dsDNA, RNA), organelles, amino acids, peptides, proteins, carbohydrates, glycoproteins, or any combination thereof. The biological sample can include a matrix (e.g., a gel or polymer matrix) comprising a cell or one or more constituents from a cell (e.g., cell bead), such as DNA, RNA, organelles, proteins, or any combination thereof, from the cell. The biological sample may be obtained from a tissue of a subject. The biological sample can include a hardened cell. Such hardened cells may or may not include a cell wall or cell membrane. The biological sample can include one or more constituents of a cell but may not include other constituents of the cell. An example of such constituents may include a nucleus or an organelle. The biological sample may include a live cell. The live cell can be capable of being cultured.

[0239] The term “blood sample,” as used herein, generally refer to a whole blood specimen taken from an individual. In some embodiments, the absorbent or bibulous member may separate components of the blood sample, such as to produce a serum sample or a plasma sample, wherein such produced samples may be referred to herein as a portion of the blood sample. In some embodiments, the blood sample comprises a glycopolypeptide, such as a glycoprotein.

[0240] The term “biomarker,” as used herein, generally refers to any measurable substance taken as a sample from a subject whose presence is indicative of some phenomenon. Non-limiting examples of such phenomenon can include a disease state, a condition, or exposure to a compound or environmental condition. In various embodiments described herein, biomarkers may be used for diagnostic purposes (e.g., to diagnose a disease state, a health state, an asymptomatic state, a symptomatic state, etc.). The term “biomarker” may be used interchangeably with the term “marker.”

[0241] The term “denatured protein,” as used herein, generally refers to a protein that loses quaternary structure, tertiary structure, and secondary structure which is present in their native state.

[0242] The term “peptide,” as used herein, generally refers to amino acids linked by peptide bonds. Peptides can include amino acid chains between 10 and 50 residues. Peptides can include amino acid chains shorter than 10 residues, including, oligopeptides, dipeptides, tripeptides, and tetrapeptides. Peptides can include chains longer than 50 residues and may be referred to as “polypeptides” or “proteins.”

[0243] The term “sequence,” as used herein, generally refers to a biological sequence including one-dimensional monomers that can be assembled to generate a polymer. Non-limiting examples of sequences include nucleotide sequences (e.g., ssDNA, dsDNA, and RNA), amino acid sequences (e.g., proteins, peptides, and polypeptides), and carbohydrates (e.g., compounds including Cₘ (H₂O) ₙ).

[0244] As used herein, “abundance,” may refer to a quantitative value generated using mass spectrometry. In various embodiments, the quantitative value may relate to an amount of a particular peptide structure (e.g., biomarker) present in a biological sample. In some embodiments, the amount may be in relation to other structures present in the sample (e.g., relative abundance). In some embodiments, the quantitative value may comprise an amount of an ion produced using mass spectrometry. In some embodiments, the quantitative value may be associated with an m/z value (e.g., abundance on x-axis and m/z on y-axis). In other embodiments, the quantitative value may be expressed in atomic mass units.

[0245] As used herein, “relative abundance,” may refer to a comparison of two or more abundances. In various embodiments, the comparison may comprise comparing one peptide structure to a total number of peptide structures. In some embodiments, the comparison may comprise comparing one peptide glycoform (e.g., two identical peptides differing by one or more glycans) to a set of peptide glycoforms. In some embodiments, the comparison may comprise comparing a number of ions having a particular m/z ratio by a total number of ions detected. In various embodiments, a relative abundance can be expressed as a ratio. In other embodiments, a relative abundance can be expressed as a percentage. Relative abundance can be presented on a y-axis of a mass spectrum plot.

[0246] As used herein, a “subject” or an “individual,” which are terms that are used interchangeably, is a mammal. In some embodiments, a “mammal” includes humans, non-human primates, domestic and farm animals, and zoo, sports, or pet animals, such as dogs, horses, rabbits, cattle, pigs, hamsters, gerbils, mice, ferrets, rats, cats, monkeys, etc. In some embodiments, the subject or individual is human.

[0247] Throughout this disclosure, various aspects of the claimed subject matter are presented in a range format. It should be understood that the description in range format is merely for convenience and brevity and should not be construed as an inflexible limitation on the scope of the claimed subject matter. Accordingly, the description of a range should be considered to have specifically disclosed all the possible sub-ranges as well as individual numerical values within that range. For instance, where a range of values is provided, it is understood that each intervening value, to the tenth of the unit of the lower limit, unless the context clearly dictate otherwise, between the upper and lower limit of that range and any other stated or intervening value in that stated range, is encompassed within the disclosure, subject to any specifically excluded limit in the stated range. Where the stated range includes one or both of the limits, ranges excluding either or both of those included limits are also included in the disclosure. In some embodiments, two opposing and open ended ranges are provided for a feature, and in such description it is envisioned that combinations of those two ranges are provided herein. For example, in some embodiments, it is described that a feature is greater than about 10 units, and it is described (such as in another sentence) that the feature is less than about 20 units, and thus, the range of about 10 units to about 20 units is described herein.

[0248] The term “about” as used herein refers to the usual error range for the respective value readily known in this technical field. Reference to “about” a value or parameter herein includes (and describes) variations that are directed to that value or parameter per se. For example, description referring to “about X” includes description of “X.”

[0249] As used herein, “substantially” means sufficient to work for the intended purpose. The term “substantially” thus allows for minor, insignificant variations from an absolute or perfect state, dimension, measurement, result, or the like such as would be expected by a person of ordinary skill in the field but that do not appreciably affect overall performance. When used with respect to numerical values or parameters or characteristics that can be expressed as numerical values, “substantially” means within ten percent.

[0250] As used herein, including in the appended claims, the singular forms “a,” “or,” and “the” include plural referents unless the context clearly dictates otherwise. For example, “a” or “an” means “at least one” or “one or more.” It is understood that aspects and variations described herein include embodiments “consisting” and/or “consisting essentially of” such aspects and variations.

[0251] The use of the term “or” in the claims is used to mean “and/or” unless explicitly indicated to refer to alternatives only or the alternatives are mutually exclusive, although the disclosure supports a definition that refers to only alternatives and “and/or.” For example, “x, y, and/or z” can refer to “x” alone, “y” alone, “z” alone, “x, y, and z,” “(x and y) or z,” “x or (y and z),” or “x or y or z.” It is specifically contemplated that x, y, or z may be specifically excluded from an embodiment. As used herein “another” may mean at least a second or more.

[0252] The term “ones” means more than one.

[0253] As used herein, the term “plurality” may be 2, 3, 4, 5, 6, 7, 8, 9, 10, or more.

[0254] As used herein, the term “set of” means one or more. For example, a set of items includes one or more items.

[0255] As used herein, the phrase “at least one of,” when used with a list of items, means different combinations of one or more of the listed items may be used and only one of the items in the list may be needed. The item may be a particular object, thing, step, operation, process, or category. In other words, “at least one of” means any combination of items or number of items may be used from the list, but not all of the items in the list may be required. For example, without limitation, “at least one of item A, item B, or item C” means item A; item A and item B; item B; item A, item B, and item C; item B and item C; or item A and C. In some cases, “at least one of item A, item B, or item C” means, but is not limited to, two of item A, one of item B, and ten of item C; four of item B and seven of item C; or some other suitable combination.

[0256] Reference throughout this specification to “one embodiment,” “an embodiment,” “a particular embodiment,” “a related embodiment,” “a certain embodiment,” “an additional embodiment,” or “a further embodiment” or combinations thereof means that a particular feature, structure or characteristic described in connection with the embodiment is included in at least one embodiment of the present invention. Thus, the appearances of the foregoing phrases in various places throughout this specification are not necessarily all referring to the same embodiment. Furthermore, the particular features, structures, or characteristics may be combined in any suitable manner in various embodiments.

[0257] “Treating” or treatment of a disease or condition refers to executing a protocol, which may include administering one or more drugs to an individual, such as a patient, in an effort to alleviate signs or symptoms of the disease. Desirable effects of treatment include decreasing the rate of disease progression, ameliorating or palliating the disease state, and remission or improved prognosis. Alleviation can occur prior to signs or symptoms of the disease or condition appearing, as well as after their appearance. Thus, “treating” or “treatment” may include “preventing” or “prevention” of disease or undesirable condition. In addition, “treating” or “treatment” does not require complete alleviation of signs or symptoms, does not require a cure, and specifically includes protocols that have only a marginal effect on the patient.

[0258] The term “therapeutically effective” as used throughout this application refers to anything that promotes or enhances the well-being of the subject with respect to the medical treatment of this condition. This includes, but is not limited to, a reduction in the frequency or severity of one or more signs or symptoms of a disease, including melanoma.

[0259] The term “disease state” as used herein, generally refers to a condition that affects the structure or function of an organism. Non-limiting examples of causes of disease states may include pathogens, immune system dysfunctions, cell damage caused by aging, cell damage caused by other factors (e.g., trauma and cancer). Disease states can include any state of a disease whether symptomatic or asymptomatic. Disease states can include disease stages of a disease progression. Disease states can cause minor, moderate, or severe disruptions in structure or function of an organism (e.g., a subject).

[0260] The term “fragment,” as used herein, generally refers to an ion fragmentation process which occurs in a MRM-MS instrument. Fragmenting may produce various fragments having the same mass but varying with respect to their charge, e.g., some biomarkers described herein produce more than one product m/z.

[0261] The term “glycopeptide structure monomer weight score,” (also “peptide structure monomer weight score,” used interchangeably) as used herein, generally refers to a value calculated as a function of a site occupancy score of a given peptide structure at a given site and the number of a specific monomer (e.g., specific monosaccharide) for the given glycopeptide structure. In some cases, a glycopeptide structure monomer weight score is a product of the site occupancy score and the number of a specific monomer for the given glycopeptide structure. Thus, as one example, a glycopeptide structure monomer weight score for glycan 5402 at site 33 of the AGP1 protein is the product of the number of a particular type of monomer (e.g., hexose) on that structure and the site occupancy of the 5402 structure at that site. A “glycopeptide structure monomer weight score” may, in some embodiments, be described in terms of a particular type of monomer and/or a particular type of peptide structure. For example a specific glycopeptide structure monomer weight score may be a glycan 5402 hexose weight score, i.e., a glycopeptide structure monomer weight score calculated as a product of the number of hexose molecules on glycan 5402 (i.e., 5) and the site occupancy of glycan 5402 at a particular site.

[0262] The term “monomer weight score,” as used herein, generally refers to a value calculated as a sum of individual glycopeptide structure monomer weight scores for all peptide structures at a particular site. In some embodiments, the monomer weight score is a sum of the individual glycopeptide structure monomer weight scores for all peptide structures at a particular site. Thus, as one example, a monomer weight score for hexose at site 33 of the protein AGP1 is a sum of the individual hexose weight scores for each glycan at site 33.

[0263] The term “monomer,” as used herein, generally refers to a single or type of unit of a glycan structure. In some aspects, the term “monomer” describes a monosaccharide. Examples of monomers include hexose (e.g., mannose or galactose), HexNac (e.g., GlcNAc or GalNAc), fucose, sialic acid (e.g., NeuAc), mannose, galactose, GlcNAc, and GalNAc.

[0264] The term “patient,” as used herein, generally refers to a mammalian subject. The mammal can be a human, or an animal including, but not limited to an equine, porcine, canine, feline, ungulate, and primate animal. In one embodiment, the individual is a human. The methods and uses described herein are useful for both medical and veterinary uses. A “patient” is a human subject unless specified to the contrary.

[0265] The term “site monomer,” (also “monomer weight feature”), as used herein, generally refers to a single type of glycan monomer at a particular glycopeptide structure site. Types of glycan monomers include, for example, hexose (i.e., mannose and galactose; referred to herein in some aspect as “hex”), HexNac (i.e., GlcNAc and GalNAc; referred to herein in some aspect as “hexnac”), fucose (i.e., deoxyhexose; referred to herein in some aspect as “fuco”), and sialic acid (i.e., NeuAc; referred to herein in some aspect as “sial”). Thus, as one example, site monomers for site 33 of protein AGP1 include AGP1_33_hex (i.e., a hexose monomer at site 33 of AGP1), AGP1_33_hexnac (i.e., a GlcNAc or GalNAc monomer at site 33 of AGP1), AGP1_33_fuco (i.e., a focuse monomer at site 33 of AGP1), and AGP1_33_sial (i.e., a sialic acid monomer at site 33 of AGP1).

[0266] The term “training data,” as used herein generally refers to data that can be input into models, statistical models, algorithms and any system or process able to use existing data to make predictions.

[0267] As used herein, a “model” may include one or more algorithms, one or more mathematical techniques, one or more machine learning algorithms, or a combination thereof.

[0268] As used herein, “machine learning” may be the practice of using algorithms to parse data, learn from it, and then make a determination or prediction about something in the world. Machine learning uses algorithms that can learn from data without relying on rules-based programming. A machine learning algorithm may include a parametric model, a nonparametric model, a deep learning model, a neural network, a linear discriminant analysis model, a quadratic discriminant analysis model, a support vector machine, a random forest algorithm, a nearest neighbor algorithm, a combined discriminant analysis model, a k-means clustering algorithm, a supervised model, an unsupervised model, logistic regression model, a multivariable regression model, a penalized multivariable regression model, or another type of model.

[0269] As used herein, an “artificial neural network” or “neural network” (NN) may refer to mathematical algorithms or computational models that mimic an interconnected group of artificial nodes or neurons that processes information based on a connectionistic approach to computation. Neural networks, which may also be referred to as neural nets, can employ one or more layers of nonlinear units to predict an output for a received input. Some neural networks include one or more hidden layers in addition to an output layer. The output of each hidden layer is used as input to the next layer in the network, i.e., the next hidden layer or the output layer. Each layer of the network generates an output from a received input in accordance with current values of a respective set of parameters. In the various embodiments, a reference to a “neural network” may be a reference to one or more neural networks.

[0270] A neural network may process information in two ways: when it is being trained it is in training mode and when it puts what it has learned into practice it is in inference (or prediction) mode. Neural networks learn through a feedback process (e.g., backpropagation) which allows the network to adjust the weight factors (modifying its behavior) of the individual nodes in the intermediate hidden layers so that the output matches the outputs of the training data. In other words, a neural network learns by being fed training data (learning examples) and eventually learns how to reach the correct output, even when it is presented with a new range or set of inputs. A neural network may include, for example, without limitation, at least one of a Feedforward Neural Network (FNN), a Recurrent Neural Network (RNN), a Modular Neural Network (MNN), a Convolutional Neural Network (CNN), a Residual Neural Network (ResNet), an Ordinary Differential Equations Neural Networks (neural-ODE), or another type of neural network.

[0271] As used herein, a “target glycopeptide analyte,” may refer to a peptide structure (e.g., glycosylated or aglycosylated/non-glycosylated), a fraction of a peptide structure, a sub-structure (e.g., a glycan or a glycosylation site) of a peptide structure, a product of one or more of the above listed structures and sub-structures, associated detection molecules (e.g., signal molecule, label, or tag), or an amino acid sequence that can be measured by mass spectrometry.

[0272] As used herein, a “peptide data set,” may be used interchangeably with “peptide structure data” and can refer to any data of or relating to a peptide from a resulting mass spectrometry run. A peptide data set can comprise data obtained from a sample or biological sample using mass spectrometry. A peptide dataset can comprise data relating to an external standard, data relating to an internal standard, and data relating to a target glycopeptide analyte of a sample. A peptide data set can result from analysis originating from a single run. In some embodiments, the peptide data set can include raw abundance and mass to charge ratios for one or more peptides.

[0273] As used herein, “a transition,” may refer to or identify a peptide structure. In some embodiments, a transition can refer to the specific pair of m/z values associated with a precursor ion and a product or fragment ion.

[0274] As used herein, a “non-glycosylated endogenous peptide” (“NGEP”) may refer to a peptide structure that does not comprise a glycan molecule. In various embodiments, an NGEP and a target glycopeptide analyte can originate from the same subject. In various embodiments, an NGEP and a target glycopeptide analyte may be derived from the same protein sequence. In some embodiments, the NGEP and the target glycopeptide analyte may be derived from or include the same peptide sequence. In various embodiments, an NGEP can be labeled with an isotope in preparation for mass spectrometry analysis.

[0275] As used herein, “abundance,” may refer to a quantitative value generated using mass spectrometry. In various embodiments, the quantitative value may relate to the amount of a particular peptide structure. In some embodiments, the quantitative value may comprise an amount of an ion produced using mass spectrometry. In some embodiments, the quantitative value may be expressed as an m/z value. In other embodiments, the quantitative value may be expressed in atomic mass units.

[0276] As used herein, “relative abundance,” may refer to a comparison of two or more abundances. In various embodiments, the comparison may comprise comparing one peptide structure to a total number of peptide structures. In some embodiments, the comparison may comprise comparing one peptide glycoform (e.g., two identical peptides differing by one or more glycans) to a set of peptide glycoforms. In some embodiments, the comparison may comprise comparing a number of ions having a particular m/z ratio by a total number of ions detected. In various embodiments, a relative abundance can be expressed as a ratio. In other embodiments, a relative abundance can be expressed as a percentage. Relative abundance can be presented on a y-axis of a mass spectrum plot.

[0277] As used herein, the term “glycan” refers to the carbohydrate residue of a glycoconjugate, such as the carbohydrate portion of a glycopeptide, glycoprotein, glycolipid, or proteoglycan. Glycans can be monomers or polymers of sugar residues, but typically contain at least three sugars, and can be linear or branched. A glycan may include natural sugar residues (e.g., glucose, N-acetylglucosamine, N-acetylneuraminic acid, galactose, mannose, fucose, hexose, arabinose, ribose, xylose, etc.) and/or modified sugars (e.g., 2′-fluororibose, 2′-deoxyribose, phosphomannose, 6′-sulfo N-acetylglucosamine, etc). The term “glycan” includes homo and heteropolymers of sugar residues. The term encompasses free glycans, including glycans that have been cleaved or otherwise released from a glycoconjugate. Glycan structures (as compared to glycan data formats or representations) are described by a glycan reference code number, and also illustrated in International PCT Patent Application No. PCT/US2020/016286, filed Jan. 31, 2020, which is herein incorporated by reference in its entirety for all purposes.

[0278] “Glycomolecule” as used herein includes glycans and glycoconjugates. A glycoconjugate is a molecule that includes a glycan, such as, but not limited to, glycopeptides, glycoproteins, glycolipids, glycoRNA, glycoDNA, etc. Glycomolecule includes fragments of glycoconjugates. As used herein, the term “glycopeptide,” refers to a peptide having at least one glycan residue covalently bonded thereto. A glycopeptide can be an intact protein (e.g., a glycoprotein) or any fragment thereof that has at least one glycan residue covalently bonded thereto.

[0279] As used herein, the term “glycoform” refers to a unique primary, secondary, tertiary, and quaternary structure of a protein with an attached glycan of a specific structure.

[0280] As used herein, the phrase “glycosylated peptides,” refers to a peptide bonded to a glycan. Glycosylate peptides include peptides that have been covalently modified by glycosylation to become bonded to a glycan.

[0281] As used herein, the phrase “glycopeptide fragment” or “glycosylated peptide fragment” or “glycopeptide” refers to a glycosylated peptide (or glycopeptide) having an amino acid sequence that is the same as part (but not all) of the amino acid sequence of the glycosylated protein (or glycoprotein) from which the glycosylated peptide (or glycopeptide) is obtained, e.g., ion fragmentation within a MRM-MS instrument. MRM refers to multiple-reaction-monitoring. Unless specified otherwise, within the specification, “glycopeptide fragments” or “fragments of a glycopeptide” refer to the fragments produced directly by using a mass spectrometer optionally after the glycoprotein has been digested enzymatically to produce the glycopeptides.

[0282] As used herein, the phrase “glycoprotein” refers to the glycosylated protein from which the glycosylated peptide is obtained. “Glycoprotein” refers to a protein that contains a peptide backbone covalently linked to one or more sugar moieties (i.e., glycans). As is understood by those skilled in the art, the peptide backbone typically comprises a linear chain of amino acid residues. The sugar moiety(ies) may be in the form of monosaccharides, disaccharides, oligosaccharides, and/or polysaccharides. The sugar moiety(ies) may comprise a single unbranched chain of sugar residues or may comprise one or more branched chains. In certain embodiments, sugar moieties may include sulfate and/or phosphate groups. Alternatively or additionally, sugar moieties may include acetyl, glycolyl, propyl or other alkyl modifications. In certain embodiments, glycoproteins contain O-linked sugar moieties; in certain embodiments, glycoproteins contain N-linked sugar moieties.

[0283] As used herein, the phrase “multiple reaction monitoring mass spectrometry (MRM-MS),” refers to a highly sensitive and selective method for the targeted quantification of glycans and peptides in biological samples. Unlike traditional mass spectrometry, MRM-MS is highly selective (targeted), allowing researchers to fine tune an instrument to specifically look for certain peptides' fragments of interest. MRM allows for greater sensitivity, specificity, speed, and quantitation of peptides' fragments of interest, such as a potential biomarker. MRM-MS involves using one or more of a triple quadrupole (QQQ) mass spectrometer and a quadrupole time-of-flight (qTOF) mass spectrometer.

[0284] As used herein, the phrase “multiple-reaction-monitoring (MRM) transition,” refers to the mass to charge (m/z) peaks or signals observed when a glycopeptide, or a fragment thereof, is detected by MRM-MS. The MRM transition is detected as the transition of the precursor and product ion.

[0285] “Representation” or “format” as used herein with reference to a glycan refers to any linear string of characters intended to convey compositional and/or structural features of a glycan. A glycan representation can be a string that includes symbols and/or alphanumerical characters. In some cases, a glycan representation or format can be constructed using pre-defined rules for representing the compositional and/or structural features of a glycan. For example, a glycan representation in an example format as disclosed herein is N(3)H(3)F(1)A(0). This glycan representation indicates a glycan composed of 3 N-acetyl acetylhexosamine molecules (N), 3 hexose molecules (H), 1 fucose molecule (F), and 0 N-acetylneuraminic acid (A)

[0286] As used herein, “platform-specific glycan format” refers to any glycan format that is associated with one or more specific glycomolecule search engines, e.g., one or more specific glycomolecule search engines. A platform-specific glycan format can be used by, or be compatible with, the glycomolecule search engine. In some cases, the platform-specific glycan format is a conventional glycan format used by, or compatible with, conventional glycan databases and/or conventional glycan or glycopeptide search engines. Non-limiting examples of conventional glycan formats include formats used by PGLYCO3, BYONIC and METAMORPHEUS.

[0287] “Search engine” refers to any computer-implemented program configured to receive a query (e.g., an input string) and implement algorithms to identify entries within one or more databases that provide a match to the query that meets certain predefined and/or user-specified criteria. A search engine is typically associated with its own proprietary glycan database and can rely on one or more statistical tests to determine the quality of any given match, and provide a confidence score that reflects the quality of a match. A “glycomolecule search engine” refers to any search engine for identifying glycans, glycopeptides, glycolipids, etc., in sample data. Non-limiting examples of glycomolecule or glycopeptide search engines include PGLYCO3, BYONIC and METAMORPHEUS.

[0288] Those skilled in the art will recognize that several embodiments are possible within the scope and spirit of the present disclosure. The following description illustrates the disclosure and, of course, should not be construed in any way as limiting the scope of the inventions described herein.

### B. Example Mass Spectrometry and Sample Preparation Workflow

[0289] For purposes of orientation and illustration of the description herein, provided in this section are example aspects of sample preparation and mass spectrometry workflows (FIGS. 1A-1C) for analyzing the composition of a peptide and/or glycopeptide using a mass spectrometer. Subsequent sections are provided with more details regarding certain inventive features related to methods for proteolytically digesting a biological sample comprising a glycoprotein, methods of performing a LC-MS analysis of a proteolytic glycopeptide, and mass spectrometry workflows involving any combination of elements thereof.

[0290] FIG. 1A is a schematic of an example workflow 100 for a peptide structure analysis, including of glycopeptides. The workflow 100 may include various operations including, for example, sample collection 102, sample intake 104, sample preparation and mass spectrometry processing 106, and data analysis 108.

[0291] Sample collection 102 may include, for example, obtaining a biological sample 112 from an individual 114. A biological sample 112 may take the form of a specimen obtained via one or more sampling methods. A biological sample 112 may be representative of an individual 114 as a whole or of a specific tissue, cell type, or other category or sub-category of interest. In some embodiments, the biological sample 112 includes a whole blood sample 116 obtained via a blood draw. In some embodiments, the biological sample 112 includes set of aliquoted samples 118 that include, for example, a serum sample, a plasma sample, a blood cell (e.g., white blood cell (WBC), red blood cell (RBC) sample, another type of sample, or a combination thereof. In some embodiments, the biological sample 112 is a plasma sample from the individual 114. In some embodiments, the biological sample 112 is a serum sample from the individual 114. In some embodiments, the biological sample 112 may include nucleotides (e.g., ssDNA, dsDNA, RNA), organelles, amino acids, peptides, proteins, carbohydrates, glycoproteins, or any combination thereof.

[0292] In various embodiments, a single run can analyze a sample (e.g., the sample including a peptide analyte), an external standard (e.g., an NGEP of a serum sample), and an internal standard. As such, abundance or raw abundance for the external standard, the internal standard, and target glycopeptide analyte can be determined by mass spectrometry in the same run.

[0293] In various embodiments, external standards may be analyzed prior to analyzing samples. In various embodiments, the external standards can be run independently between the samples. In some embodiments, external standards can be analyzed after every 1, 2, 3, 4, 5, 6, 7, 8, 9, 10, 11, 12, 13, 14, 15, 16, 17, 18, 19, 20, or more experiments. In various embodiments, external standard data can be used in some or all of the normalization systems and methods described herein. In additional embodiments, blank samples may be processed to prevent column fouling.

[0294] Sample intake 104 may include one or more various operations such as, for example, aliquoting, labeling, registering, processing, storing, thawing, and/or other types of operations involved with preparing a sample for sample preparation and mass spectrometry processing.

[0295] Sample preparation and mass spectrometry processing 106 may include, for example, one or more operations to form set of peptide structures 122, such as a proteolytic peptide and/or a proteolytic glycopeptide. In some embodiments, the sample preparation includes subjecting a biological sample to a proteolytic digestion. Mass spectrometry processing 124 may include, for example, liquid chromatography, introducing species from the sample, and/or derived therefrom, to a mass spectrometer, and data acquisition, such as using a multiple reaction monitoring (MRM) technique. MRM is a mass spectrometry method in which a precursor ion of a particular m/z value, including window thereof, (e.g., peptide analyte) is selected in the first quadrupole (Q1) and transmitted to the second quadrupole (Q2) for fragmentation. The resulting product ions are then transmitted to the third quadrupole (Q3), which detects only product ions with selected predefined m/z values. In some embodiments, the predefined m/z value, including window thereof, selected in the first quadrupole and a predefined m/z value, including window thereof, may be expressed as a MRM transition. Dynamic MRM (dMRM) is a variant of MRM. In dynamic MRM mode, MRM transition lists are scheduled throughout an LC/MS run based on the retention time window for each analyte. In this way, analytes are only monitored while they are eluting from the LC and therefore the MS scan time is not wasted by monitoring the analytes when they are not expected.

[0296] Data analysis 108 may include, for example, peptide structure analysis 126, e.g., determining the amino acid sequence of a peptide, determining a site of a post-translational modification, and/or determining a glycan composition and/or structure. In some embodiments, data analysis 108 also includes output generation 110. In some embodiments, output generation 110 may be considered a separate operation from data analysis 108. Output generation 110 may include, for example, generating final output 128 based on the results of peptide structure analysis 126. In some embodiments, the final output 128 may be used for one or more downstream purposes, such as research, diagnosis, and/or treatment, and may be sent to a remote system 130.

[0297] In certain aspects, the workflow 100 may optionally exclude one or more of the operations described herein and/or may optionally include one or more other steps or operations other than those described herein (e.g., in addition to and/or instead of those described herein).

[0298] FIG. 1B is a schematic of an example workflow 200 for certain sample preparation techniques 106, some of which may be optionally used in methods provided herein. In some embodiments, the workflow 200 comprises a denaturation step 202, such as to unfold and/or linearize a polypeptide to expose one or more cleavage sites. In some embodiments, the workflow 200 comprises a reduction step 202, such as to cleave disulfide bonds. In some embodiments, the workflow 200 comprises an alkylation technique 204, such as to modify cysteine residues to prevent reformation of a disulfide bond. In some embodiments, the workflow 200 comprises a protease digestion technique 206, such as to produce proteolytic peptides, including proteolytic glycopeptides. Box 205 can represent the R group of an amino acid such as, for example, an R group of arginine or lysine that typically will direct a tryptic cleavage. In some embodiments, the workflow 200 may comprise a post-digestion procedure 207, such as any of a desalting technique, addition of a standard, aliquoting, and/or preparation for a mass spectrometry analysis.

[0299] FIG. 1C is a schematic of an example workflow for certain mass spectrometry processing techniques 106, some of which may be optionally used in methods provided herein. In some embodiments, the workflow comprises a quantification technique 208 using a mass spectrometer, such as a liquid chromatography-mass spectrometry system. In some embodiments, the workflow comprises a quality control technique 210 configured to optimize data quality. In some embodiments, measures can be put in place allowing only errors within acceptable ranges outside of an expected value. In some embodiments, employing statistical models (e.g., using Westgard rules) can assist in quality control 210. For example, quality control 210 may include, for example, assessing the retention time and abundance of representative peptide structures (e.g., glycosylated and/or aglycosylated) and spiked-in internal standards, in either every sample, or in each quality control sample (e.g., pooled serum digest). In some embodiments, the workflow comprises a peak integration and normalization technique 212 to process the data that has been generated and transform the data into a format for analysis. For example, peak integration and normalization 212 may include converting abundance data for various product ions that were detected for a selected peptide structure into a single quantification metric (e.g., a relative quantity, an adjusted quantity, a normalized quantity, a relative concentration, an adjusted concentration, a normalized concentration, etc.) for that peptide structure. In some embodiments, peak integration and normalization 212 may be performed using one or more of the techniques described in U.S. Patent Publication No. 2020/0372973A1 and/or US Patent Publication No. 2020/0240996A1, the disclosures of which are incorporated by reference herein in their entireties.

### Section 1—Proteolytic Digestion and LC-MS Analysis Techniques for Samples Containing a Glycosylated PolypeptideC. Methods for Proteolytically Digesting a Biological Sample Comprising a Glycoprotein

[0300] In certain aspects, provided herein are methods of proteolytically digesting a biological sample comprising a glycoprotein, the methods comprising subjecting the biological sample to a thermal denaturation technique. Proteases are enzymes that cleave polypeptides at, generally, specific cleavage motifs. For example, trypsin is a serine protease that generally cleaves polypeptides at the carboxyl side (C-terminal side) of lysine and arginine residues. A glycan of a glycopeptide may present a steric hindrance to a protease, thereby inhibiting complete protease digestion of a biological sample comprising a glycoprotein. Without being bound to this theory, it is believed that the methods taught herein improve polypeptide unfolding, such as linearization, and provide protease access to cleavage sites thereby providing methods for more complete proteolytic digestion of glycoproteins.

[0301] In some aspects, provided is a method comprising subjecting a biological sample to a thermal denaturation technique to produce a denatured sample.

[0302] In other aspects, provided is a method comprising subjecting a biological sample to a thermal denaturation technique to produce a denatured sample followed by a proteolytic digestion technique to produce a proteolytically digested sample comprising a proteolytic glycopeptide. In some embodiments, the method comprises quenching one or more proteases used in a proteolytic digestion technique prior to a downstream technique, such as LC-MS.

[0303] In other aspects, provided herein is a method comprising: subjecting a biological sample to a thermal denaturation technique to produce a denatured sample; subjecting the denatured sample to a reduction technique to produce a reduced sample; subjecting the reduced sample to an alkylation technique to produce an alkylated sample; and subjecting the alkylated sample to a proteolytic digestion technique to produce a proteolytically digested sample comprising the proteolytic glycopeptide. In some embodiments, the method comprises quenching an alkylating agent used in the alkylation technique prior to subjecting an alkylated sample to a proteolytic digestion technique. In some embodiments, the method comprises quenching one or more proteases used in a proteolytic digestion technique prior to a downstream technique, such as LC-MS.

[0304] In some embodiments, the proteolytic digestion methods described herein produce a proteolytic digestion sample, including one comprising a proteolytic glycopeptide, having a digestion completion rate of at least about 70%, such as at least about any of 75%, 80%, 85%, 90%, 91%, 92%, 93%, 94%, 95%, 96%, 97%, 98%, or 99%. In some embodiments, the proteolytic digestion methods described herein produce a proteolytic digestion sample, including one comprising a proteolytic glycopeptide, wherein the sample volume loss is 10% or less, such as 9% or less, 8% or less, 7% or less, 6% or less, 5% or less, 4% or less, 3% or less, 2% or less, or 1% or less, based on all volumes added in producing the proteolytic digestion sample.

[0305] In the following sections, additional description of the various aspects of the proteolytic digestion techniques is provided. Such description in a modular fashion is not intended to limit the scope of the disclosure, and based on the teachings provided herein one of ordinary skill in the art will readily appreciate that certain modules can be integrated, at least in part. The section heading used herein are for organizational purposes only and are not to be construed as limiting the subject matter described.

### I. Thermal Denaturation Techniques

[0306] In certain aspects, the methods provided herein comprise performing a thermal denaturation technique. Thermal denaturation techniques, generally speaking, change certain polypeptides conformational structures, such as by unfolding and/or linearizing a polypeptide, to enable protease access to cleavage sites. Thermal denaturation techniques described herein comprise subjecting a sample, or a derivative thereof (e.g., a sample diluted with a buffer), to a thermal treatment of about 60° C. to about 100° C. for thermal denaturation incubation time of at least about 1 minute. In some embodiments, the thermal denaturation technique is not performed concurrently with a chemical denaturation technique, such as using high concentrations of denaturing agent, e.g., 6M urea. In some embodiments, the method does not include use of a chemical denaturation technique.

[0307] In some embodiments, the thermal denaturation incubation time is performed at a temperature of about 60° C. to about 100° C., such as any of about 70° C. to about 100° C., about 80° C. to about 100° C., about 90° C. to about 100° C., about 95° C. to about 100° C., or about 85° C. to about 95° C. In some embodiments, the thermal denaturation incubation time is performed at a temperature of at least about 60° C., such as at least about any of 65° C., 70° C., 75° C., 80° C., 85° C., 90° C., 95° C., or 100° C. In some embodiments, the thermal denaturation incubation time is performed at a temperature of about 100° C. or less, such as about any of 95° C. or less, 90° C. or less, 85° C. or less, 80° C. or less, 75° C. or less, 70° C. or less, 65° C. or less, 60° C. or less. In some embodiments, the thermal denaturation incubation time is performed at a temperature of about any of 60° C., 65° C., 70° C., 75° C., 80° C., 85° C., 90° C., 91° C., 92° C., 93° C., 94° C., 95° C., 96° C., 97° C., 98° C., 99° C., or 100° C.

[0308] In some embodiments, the thermal denaturation incubation time is about 1 minute to about 15 minutes, such as any of about 1 minute to about 5 minutes, about 1 minute to about 10 minutes, about 2.5 minutes to about 7.5 minutes, or about 5 minutes to about 15 minutes. In some embodiments, the thermal denaturation incubation time is at least about 1 minute, such as at least about any of 1.5 minutes, 2 minutes, 2.5 minutes, 3 minutes, 3.5 minutes, 4 minutes, 4.5 minutes, 5 minutes, 5.5 minutes, 6 minutes, 6.5 minutes, 7 minutes, 7.5 minutes, 8 minutes, 8.5 minutes, 9 minutes, 9.5 minutes, 10 minutes, 11 minutes, 12 minutes, 13 minutes, 14 minutes, or 15 minutes. In some embodiments, the thermal denaturation incubation time is about 15 minutes or less, such as about any of 14 minutes or less, 13 minutes or less, 12 minutes or less, 11 minutes or less, 10 minutes or less, 9.5 minutes or less, 9 minutes or less, 8.5 minutes or less, 8 minutes or less, 7.5 minutes or less, 7 minutes or less, 6.5 minutes or less, 6 minutes or less, 5.5 minutes or less, 5 minutes or less, 4.5 minutes or less, 4 minutes or less, 3.5 minutes or less, 3 minutes or less, 2.5 minutes or less, 2 minutes or less, 1.5 minutes or less, or 1 minute or less. In some embodiments, the thermal denaturation incubation time is about any of 1 minute, 1.5 minutes, 2 minutes, 2.5 minutes, 3 minutes, 3.5 minutes, 4 minutes, 4.5 minutes, 5 minutes, 5.5 minutes, 6 minutes, 6.5 minutes, 7 minutes, 7.5 minutes, 8 minutes, 8.5 minutes, 9 minutes, 9.5 minutes, 10 minutes, 11 minutes, 12 minutes, 13 minutes, 14 minutes, or 15 minutes.

[0309] In some embodiments, the thermal denaturation technique comprises a thermal denaturation incubation time of about 1 minute to about 15 minutes, such as about any of 1 minute, 2 minutes, 3 minutes, 4 minutes, 5 minutes, 6 minutes, 7 minutes, 8 minutes, 9 minutes 10 minutes, 11 minutes, 12 minutes, 13 minutes, 14 minutes, or 15 minutes, wherein the thermal denaturation incubation is performed at a temperature of about 60° C. to about 100° C., such about any of 60° C., 65° C., 70° C., 75° C., 80° C., 85° C., 90° C., 91° C., 92° C., 93° C., 94° C., 95° C., 96° C., 97° C., 98° C., 99° C., or 100° C.

[0310] The thermal denaturation incubation temperature can be controlled by numerous techniques and combinations thereof. In some embodiments, the thermal denaturation incubation temperature is controlled by a water bath. In some embodiments, the thermal denaturation incubation temperature is controlled by a heat block. In some embodiments, the thermal denaturation incubation temperature is controlled by a thermocycler, e.g., a thermocycler with a lid temperature control element. As described herein, in some embodiments, control of sample temperature when performed using a thermocycler is via a temperature block element. In some embodiments, temperature changes prior to and/or after the thermal denaturation incubation time temperature are controlled by a technique described herein, such as cooling at room temperature or via the thermocycler.

[0311] In some embodiments, the thermal denaturation technique comprises subjecting a sample, or a derivative thereof, e.g., a sample diluted in a buffer, to a thermal cycle. In some embodiments, the thermal cycle comprises subjecting the sample, or a derivative thereof, to one or more of: (a) a block starting temperature (b) block set temperature (the temperature for the thermal denaturation incubation time); (c) a block ending temperature; (d) one or more ramp rates between temperature changes in the thermal cycle (such as between the block starting temperature and the block set temperature or between the block set temperature and the block ending temperature); and (e) a lid temperature relative to the block temperature. In some embodiments, the thermal cycle is performed, in whole or in part, using a thermocycler. In some embodiments, the thermal cycle is configured to reduce and/or prevent loss of sample, such as by escaping vapor and/or condensation when the sample container is opened. In some embodiments, the thermal cycle comprises a set block temperature of about 60° C. to about 100° C., including about any of 60° C., 65° C., 70° C., 75° C., 80° C., 85° C., 90° C., 91° C., 92° C., 93° C., 94° C., 95° C., 96° C., 97° C., 98° C., 99° C., or 100° C. In some embodiments, the thermal cycle comprises: (a) a set block temperature of about 60° C. to about 100° C., including about any of 60° C., 65° C., 70° C., 75° C., 80° C., 85° C., 90° C., 91° C., 92° C., 93° C., 94° C., 95° C., 96° C., 97° C., 98° C., 99° C., or 100° C., and (b) a block ending temperature of about 15° C. to about 35° C., such as any of about 20° C. to about 35° C., or about 20° C. to about 25° C. In some embodiments, the thermal cycle comprises: (a) starting block temperature of about 15° C. to about 50° C., such as any of 15° C. to about 25° C., about 20° C. to about 30° C., or about 20° C. to about 25° C., including about any of 20° C., 21° C., 22° C., 23° C., 24° C., 25° C., (b) a set block temperature of about 60° C. to about 100° C., such about any of 60° C., 65° C., 70° C., 75° C., 80° C., 85° C., 90° C., 91° C., 92° C., 93° C., 94° C., 95° C., 96° C., 97° C., 98° C., 99° C., or 100° C., and (c) a block ending temperature of about 15° C. to about 35° C., such as any of about 20° C. to about 35° C., or about 20° C. to about 25° C. In any of the thermal cycles described herein, in some embodiments, the lid temperature during the thermal cycle is configured to reduce and/or inhibit condensate formation near or on the lid of a sample container. In some embodiments, the lid temperature during the thermal cycle is at least about 2° C., such as at least about any of 2.5° C., 3° C., 3.5° C., 4° C., 4.5° C., 5° C., 5.5° C., 6° C., 6.5° C., 7° C., 7.5° C., 8° C., 8.5° C., 9° C., 9.5° C., 10° C., 11° C., 12° C., 13° C., 14° C., 15° C., 16° C., 17° C., 18° C., 19° C., or 20° C., higher than the respective temperature of the block during the thermal cycle. In some embodiments, the lid temperature during at least a portion of a thermal cycle is about 102° C. to about 120° C., such as about any of 103° C., 104° C., 105° C., 106° C., 107° C., 108° C., 109° C., or 110° C. In some embodiments, the lid temperature during the thermal cycle may be the same respective temperature of the block during the thermal cycle or a temperature greater than the temperature of the block during the thermal cycle.

[0312] In some embodiments, the ramp rate between a temperature change in a thermal cycle (such as between a block starting temperature and a block set temperature and/or between a block set temperature a the block ending temperature) is about 1° C./second to about 10° C./second, such as any of 1° C./second, 1.5° C./second, 2° C./second, 2.5° C./second, 3° C./second, 3.5° C./second, 4° C./second, 4.5° C./second, 5° C./second, 5.5° C./second, 6° C./second, 6.5° C./second, 7° C./second, 7.5° C./second, 8° C./second, 8.5° C./second, 9° C./second, 9.5° C./second, or 10° C./second.

[0313] In some embodiments, the method further comprises admixing an amount of a biological sample a buffer prior to the thermal denaturation technique (e.g., the buffered sample is subjected to a thermal denaturation technique described herein). In some embodiment, the amount (as assessed based on the final concentration in the sample containing solution containing solution) of the buffer is about 1 mM to about 100 mM, such as any of about 20 mM to about 80 mM, about 30 mM to about 70 mM, or about 40 mM to about 60 mM. In some embodiment, the amount of the buffer is about any of 10 mM, 15 mM, 20 mM, 25 mM, 30 mM, 35 mM, 40 mM, 45 mM, 50 mM, 55 mM, 60 mM, 65 mM, 70 mM, 75 mM, 80 mM, 85 mM, 90 mM, 95 mM, or 100 mM. In some embodiments, the buffer is selected from the group consisting of ammonium bicarbonate, ammonium acetate, ammonium formate, triethylammonium bicarbonate, and Tris-HCl, or any combination thereof.

[0314] In some embodiments, the method further comprises determining the protein concentration in a biological sample or a derivative thereof.

### II. Reduction Techniques

[0315] In certain aspects, the methods provided herein comprise performing a reduction technique. In some embodiments, the reduction technique is performed on a sample, or a derivative thereof, following thermal denaturation. Reduction techniques, generally speaking, reduce (e.g., cleave) disulfide linkages between cysteine residues of one or more polypeptides to reduce the presence of polypeptide conformations that inhibit or prevent protease cleavage of the one or more polypeptides. Reduction techniques described herein comprise subjecting a sample, or a derivative thereof (e.g., a denatured sample), to an amount of a reducing agent and incubating for a reducing incubation time performed at a temperature or range thereof. In some embodiments, the reducing agent is dithiothreitol (DTT), tris(2-carboxyethyl) phosphine (TCEP), beta-mercaptoethanol (BME), or a cysteine, or any mixture thereof.

[0316] In some embodiments, the amount (as assessed based on the final concentration in the sample containing solution containing solution) of a reducing agent, e.g., DTT, used in a reduction technique is about 1 mM to about 100 mM, such as any of about 1 mM to about 40 mM, about 1 mM to about 30 mM, about 5 mM to about 25 mM, about 10 mM, to about 20 mM, 20 mM to about 80 mM, about 30 mM to about 70 mM, or about 40 mM to about 60 mM. In some embodiments, the amount of reducing agent used in a reduction technique is at least about 1 mM, such as at least about any of 2 mM, 3 mM, 4 mM, 5 mM, 6 mM, 7 mM, 8 mM, 9 mM, 10 mM, 11 mM, 12 mM, 13 mM, 14 mM, 15 mM, 16 mM, 17 mM, 18 mM, 19 mM, 20 mM, 25 mM, 30 mM, 35 mM, 40 mM, 45 mM, 50 mM, 55 mM, 60 mM, 65 mM, 70 mM, 75 mM, 80 mM, 85 mM, 90 mM, 95 mM, or 100 mM. In some embodiments, the amount of reducing agent used in a reduction technique is about 100 mM or less, such as about any of 95 mM or less, 90 mM or less, 85 mM or less, 80 mM or less, 75 mM or less, 70 mM or less, 65 mM or less, 60 mM or less, 55 mM or less, 50 mM or less, 45 mM or less, 40 mM or less, 35 mM or less, 30 mM or less, 25 mM or less, 20 mM or less, 19 or less, 18 or less, 17 or less, 16 or less, 15 or less, 14 or less, 13 or less, 12 or less, 11 or less, 10 or less, 9 or less, 8 or less, 7 or less, 6 or less, 5 or less, 4 or less, 3 or less, 2 or less, or 1 or less. In some embodiments, the amount of reducing agent used in a reduction technique is about any of 1 mM, 2 mM, 3 mM, 4 mM, 5 mM, 6 mM, 7 mM, 8 mM, 9 mM, 10 mM, 11 mM, 12 mM, 13 mM, 14 mM, 15 mM, 16 mM, 17 mM, 18 mM, 19 mM, 20 mM, 25 mM, 30 mM, 35 mM, 40 mM, 45 mM, 50 mM, 55 mM, 60 mM, 65 mM, 70 mM, 75 mM, 80 mM, 85 mM, 90 mM, 95 mM, or 100 mM.

[0317] In some embodiments, the reduction incubation time is about 10 minutes to about 120 minutes, such as any of about 30 minutes to about 60 minutes, about 40 minutes to about 60 minutes, about 45 minutes to about 55 minutes. In some embodiments, the reduction incubation time is at least about 20 minutes, such as at least about any of 25 minutes, 30 minutes, 35 minutes, 40 minutes, 45 minutes, 50 minutes, 55 minutes, 60 minutes, 65 minutes, 70 minutes, 75 minutes, 80 minutes, 85 minutes, 90 minutes, 95 minutes, 100 minutes, 105 minutes, 110 minutes, 115 minutes. In some embodiments, the reduction incubation time is about 120 minutes or less, such as about any of 115 minutes or less, 110 minutes or less, 105 minutes or less, 100 minutes or less, 95 minutes or less, 90 minutes or less, 85 minutes or less, 80 minutes or less, 75 minutes or less, 70 minutes or less, 65 minutes or less, 60 minutes or less, 55 minutes or less, 50 minutes or less, 45 minutes or less, 40 minutes or less, 35 minutes or less, 30 minutes or less, or 25 minutes or less. In some embodiments, the reduction incubation time is about any of 20 minutes, 25 minutes, 30 minutes, 35 minutes, 40 minutes, 45 minutes, 50 minutes, 55 minutes, 60 minutes, 65 minutes, 70 minutes, 75 minutes, 80 minutes, 85 minutes, 90 minutes, 95 minutes, 100 minutes, 105 minutes, 110 minutes, 115 minutes.

[0318] In some embodiments, the reduction incubation time is performed at a temperature of about 20° C. to about 100° C., such as any of about 40° C. to about 80° C., about 50° C. to about 70° C., about 50° C. to about 60° C., about 55° C. to about 65° C., or about 60° C. to about 70° C. In some embodiments, the reduction incubation time is performed at a temperature of at least about 20° C., such as at least about any of 25° C., 30° C., 35° C., 40° C., 45° C., 50° C., 55° C., 60° C., 65° C., 70° C., 75° C., 80° C., 85° C., 90° C., or 95° C. In some embodiments, the reduction incubation time is performed at a temperature of about 95° C. or less, such as about any of 90° C. or less, 85° C. or less, 80° C. or less, 75° C. or less, 70° C. or less, 65° C. or less, 60° C. or less, 55° C. or less, 50° C. or less, 45° C. or less, 40° C. or less, 35° C. or less, 30° C. or less, or 25° C. or less. In some embodiments, the reduction incubation time is performed at a temperature of about any of 20° C., 25° C., 30° C., 35° C., 40° C., 45° C., 50° C., 51° C., 52° C., 53° C., 54° C., 55° C., 56° C., 57° C., 58° C., 59° C., 60° C., 61° C., 62° C., 63° C., 64° C., 65° C., 66° C., 67° C., 68° C., 69° C., 70° C., 75° C., 80° C., 85° C., 90° C., or 95° C. In some embodiments, the reduction incubation time is performed at a room temperature.

[0319] In some embodiments, the reduction technique comprises a reduction incubation time of about 30 minutes to about 70 minutes, such as about any of 35 minutes, 40 minutes, 45 minutes, 50 minutes, 55 minutes, 60 minutes, or 65 minutes, wherein the reduction incubation time is performed at a temperature of about 50° C. to about 70° C., such about any of 55° C., 60° C., or 65° C. In some embodiments, the reduction technique comprises use of an amount (as assessed based on the final concentration in the sample containing solution) of a reducing agent, e.g., DTT, of about 5 mM to about 25 mM, such as any of about 6 mM, 7 mM, 8 mM, 9 mM, 10 mM, 11 mM, 12 mM, 13 mM, 14 mM, 15 mM, 16 mM, 17 mM, 18 mM, 19 mM, 20 mM, 21 mM, 22 mM, 23 mM, or 24 mM, and a reduction incubation time of about 30 minutes to about 70 minutes, such as about any of 35 minutes, 40 minutes, 45 minutes, 50 minutes, 55 minutes, 60 minutes, or 65 minutes, wherein the reduction incubation time is performed at a temperature of about 50° C. to about 70° C., such about any of 55° C., 60° C., or 65° C.

[0320] The reduction incubation temperature can be controlled by numerous techniques and combinations thereof. In some embodiments, the reduction incubation temperature is controlled by an ambient temperature, such as room temperature. In some embodiments, the reduction incubation temperature is controlled by a water bath. In some embodiments, the reduction incubation temperature is controlled by a heat block. In some embodiments, the reduction incubation temperature is controlled by a thermocycler, e.g., a thermocycler with a lid temperature control element. As described herein, in some embodiments, control of sample temperature when performed using a thermocycler is via a temperature block element. In some embodiments, temperature changes prior to and/or after the reduction incubation time temperature are controlled by a technique described herein, such as cooling at room temperature or a ramp rate.

[0321] In some embodiments, the reduction technique comprises subjecting a sample, or a derivative thereof, e.g., a denatured sample, to a thermal cycle. In some embodiments, the thermal cycle comprises subjecting the sample, or a derivative thereof, to one or more of: (a) a block starting temperature (b) block set temperature (the temperature for the reduction incubation time); (c) a block ending temperature; (d) one or more ramp rates between temperature changes in the thermal cycle (such as between the block starting temperature and the block set temperature or between the block set temperature and the block ending temperature); and (e) a lid temperature relative to the block temperature. In some embodiments, the thermal cycle is performed, in whole or in part, using a thermocycler. In some embodiments, the thermal cycle is configured to reduce and/or prevent loss of sample, such as by escaping vapor and/or condensation when the sample container is opened. In some embodiments, the thermal cycle comprises a set block temperature of about 20° C. to about 100° C., such as any of 40° C. to about 80° C., about 50° C. to about 70° C., about 50° C. to about 60° C., about 55° C. to about 65° C., or about 60° C. to about 70° C., including about any of 50° C., 55° C., 60° C., 65° C., or 70° C. In some embodiments, the thermal cycle comprises: (a) a set block temperature of about 20° C. to about 100° C., such as any of about 40° C. to about 80° C., about 50° C. to about 70° C., about 50° C. to about 60° C., about 55° C. to about 65° C., or about 60° C. to about 70° C., including about any of 50° C., 55° C., 60° C., 65° C., or 70° C., and (b) a block ending temperature of about 15° C. to about 35° C., such as any of about 20° C. to about 35° C., or about 20° C. to about 25° C. In some embodiments, the thermal cycle comprises: (a) starting block temperature of about 15° C. to about 60° C., such as any of about 15° C. to about 50° C., about 20° C. to about 40° C., about 20° C. to about 30° C., or about 20° C. to about 25° C., (b) a set block temperature of about 20° C. to about 100° C., such as any of about 40° C. to about 80° C., about 50° C. to about 70° C., about 50° C. to about 60° C., about 55° C. to about 65° C., or about 60° C. to about 70° C., including about any of 50° C., 55° C., 60° C., 65° C., or 70° C., and (c) a block ending temperature of about 15° C. to about 35° C., such as any of about 20° C. to about 35° C., or about 20° C. to about 25° C. In any of the thermal cycles described herein, in some embodiments, the lid temperature during the thermal cycle is configured to reduce and/or inhibit condensate formation near or on the lid of a sample container. In some embodiments, the lid temperature during the thermal cycle is at least about 2° C., such as at least about any of 2.5° C., 3° C., 3.5° C., 4° C., 4.5° C., 5° C., 5.5° C., 6° C., 6.5° C., 7° C., 7.5° C., 8° C., 8.5° C., 9° C., 9.5° C., 10° C., 11° C., 12° C., 13° C., 14° C., 15° C., 16° C., 17° C., 18° C., 19° C., or 20° C., higher than the respective temperature of the block during the thermal cycle. In some embodiments, the lid temperature during at least a portion of a thermal cycle is about 102° C. to about 120° C., such as about any of 103° C., 104° C., 105° C., 106° C., 107° C., 108° C., 109° C., or 110° C.

[0322] In some embodiments, the ramp rate between a temperature change in a thermal cycle (such as between a block starting temperature and a block set temperature and/or between a block set temperature a the block ending temperature) is about 1° C./second to about 10° C./second, such as any of 1° C./second, 1.5° C./second, 2° C./second, 2.5° C./second, 3° C./second, 3.5° C./second, 4° C./second, 4.5° C./second, 5° C./second, 5.5° C./second, 6° C./second, 6.5° C./second, 7° C./second, 7.5° C./second, 8° C./second, 8.5° C./second, 9° C./second, 9.5° C./second, or 10° C./second.

[0323] In some embodiments, the reduction technique described herein is completed simultaneously with a thermal denaturation step. For example, the combined thermal denaturation technique and reduction technique comprises adding a reducing agent to a sample, or a derivative thereof, and then subjecting the sample, or the derivative thereof, to a temperature of about 60° C. to about 100° C., such about any of 60° C., 65° C., 70° C., 75° C., 80° C., 85° C., 90° C., 91° C., 92° C., 93° C., 94° C., 95° C., 96° C., 97° C., 98° C., 99° C., or 100° C., for an incubation time of at least about 1 minute, such as at least about any of 2 minutes, 3 minutes, 4 minutes, 5 minutes, 10 minutes, 15 minutes, 20 minutes, 25 minutes, 30 minutes, 35 minutes, 40 minutes, 45 minutes, 50 minutes, 55 minutes, or 60 minutes. In some embodiments, the combined thermal denaturation technique and reduction technique comprises adding a reducing agent to a sample, or a derivative thereof, and then subjecting the sample, or the derivative thereof, to a temperature of about 90° C. to about 100° C., for an incubation time of about 40 minutes to about 60 minutes, including 50 minutes.

### III. Alkylation Techniques

[0324] In certain aspects, the methods provided herein comprise performing an alkylation technique. In some embodiments, the alkylation technique is performed on a sample, or a derivative thereof, following the performance of a reduction technique. Alkylation techniques, generally speaking, prevent the reformation of one or more disulfide linkages between, e.g., cysteine residues of one or more polypeptides. This is done by, e.g., the addition of an acetamide moiety to the sulfur of a cysteine residue thereby producing an alkylated polypeptide. Alkylation techniques may reduce the presence of polypeptide conformations that inhibit or prevent protease cleavage of the one or more polypeptides. Alkylation techniques described herein comprise subjecting a sample, or a derivative thereof (e.g., a reduced sample), to an amount of an alkylating agent and incubating for an alkylation incubation time performed at a temperature or range thereof. In some embodiments, the method comprises subjecting a denatured sample to a reduction technique followed by an alkylation technique prior to performing a proteolytic digestion technique.

[0325] In some embodiments, the alkylating agent is iodoacetamide (IAA), 2-chloroacetamide, an acetamide salt, or any mixture thereof.

[0326] In some embodiments, the amount (as assessed based on the final concentration in the sample containing solution) of an alkylating agent, e.g., IAA, used in an alkylation technique is about 10 mM to about 100 mM, such as any of about 10 mM to about 50 mM, about 20 mM to about 40 mM, about 20 mM to about 36 mM, about 15 mM to about 25 mM, about 20 mM to about 25 mM, about 20 mM to about 80 mM, about 30 mM to about 70 mM, or about 40 mM to about 60 mM. In some embodiments, the amount of an alkylating agent used in an alkylation technique is at least about 10 mM, such as at least about any of 15 mM, 16 mM, 17 mM, 18 mM, 19 mM, 20 mM, 21 mM, 22 mM, 23 mM, 24 mM, 25 mM, 30 mM, 35 mM, 40 mM, 45 mM, 50 mM, 55 mM, 60 mM, 65 mM, 70 mM, 75 mM, 80 mM, 85 mM, 90 mM, 95 mM, or 100 mM. In some embodiments, the amount of an alkylating agent used in an alkylation technique is about 100 mM or less, such as about any of 95 mM or less, 90 mM or less, 85 mM or less, 80 mM or less, 75 mM or less, 70 mM or less, 65 mM or less, 60 mM or less, 55 mM or less, 50 mM or less, 45 mM or less, 40 mM or less, 35 mM or less, 30 mM or less, 25 mM or less, 24 mM or less, 23 mM or less, 22 mM or less, 21 mM or less, 20 mM or less, 19 mM or less, 18 mM or less, 17 mM or less, 16 mM or less, 15 mM or less, or 10 mM or less. In some embodiments, the amount of an alkylating agent used in an alkylation technique is about any of 10 mM, 15 mM, 20 mM, 20.5 mM, 21 mM, 21.5 mM, 22 mM, 22.5 mM, 23 mM, 23.5 mM, 24 mM, 24.5 mM, 25 mM, 30 mM, 35 mM, 40 mM, 45 mM, 50 mM, 55 mM, 60 mM, 65 mM, 70 mM, 75 mM, 80 mM, 85 mM, 90 mM, 95 mM, or 100 mM.

[0327] In some embodiments, the alkylation incubation time is about 5 minutes to about 60 minutes, such as any of about 10 minutes to about 50 minutes, about 20 minutes to about 40 minutes, about 25 minutes to about 35 minutes. In some embodiments, the alkylation incubation time is at least about 5 minutes, such as at least about any of 10 minutes, 15 minutes, 20 minutes, 25 minutes, 30 minutes, 35 minutes, 40 minutes, 45 minutes, 50 minutes, 55 minutes, or 60 minutes. In some embodiments, the alkylation incubation time is about 60 minutes or less, such as about any of 55 minutes or less, 50 minutes or less, 45 minutes or less, 40 minutes or less, 35 minutes or less, 30 minutes or less, 25 minutes or less, 20 minutes or less, 15 minutes or less, 10 minutes or less, or 5 minutes or less. In some embodiments, the alkylation incubation time is about any of 5 minutes, 10 minutes, 15 minutes, 20 minutes, 25 minutes, 30 minutes, 35 minutes, 40 minutes, 45 minutes, 50 minutes, 55 minutes, or 60 minutes.

[0328] In some embodiments, the alkylation incubation time is performed at a temperature of about 15° C. to about 100° C., such as any of about 15° C. to about 80° C., about 15° C. to about 60° C., about 15° C. to about 35° C., about 20° C. to about 30° C., or about 20° C. to about 25° C. In some embodiments, the alkylation incubation time is performed at a temperature of at least about 15° C., such as at least about any of 20° C., 21° C., 22° C., 23° C., 24° C., 25° C., 30° C., 35° C., 40° C., 45° C., 50° C., 55° C., 60° C., 65° C., 70° C., 75° C., 80° C., 85° C., 90° C., or 95° C. In some embodiments, the alkylation incubation time is performed at a temperature of about 95° C. or less, such as about any of 90° C. or less, 85° C. or less, 80° C. or less, 75° C. or less, 70° C. or less, 65° C. or less, 60° C. or less, 55° C. or less, 50° C. or less, 45° C. or less, 40° C. or less, 35° C. or less, 30° C. or less, 25° C. or less, 24° C. or less, 23° C. or less, 22° C. or less, 21° C. or less, or 20° C. or less. In some embodiments, the alkylation incubation time is performed at a temperature of about any of 15° C., 16° C., 17° C., 18° C., 19° C., 20° C., 21° C., 22° C., 23° C., 24° C., 25° C., 30° C., 35° C., 40° C., 45° C., 50° C., 51° C., 52° C., 53° C., 54° C., 55° C., 56° C., 57° C., 58° C., 59° C., 60° C., 61° C., 62° C., 63° C., 64° C., 65° C., 66° C., 67° C., 68° C., 69° C., 70° C., 75° C., 80° C., 85° C., 90° C., or 95° C. In some embodiments, the alkylation incubation time is performed at a room temperature.

[0329] In some embodiments, the alkylation technique comprises an alkylation incubation time of about 5 minutes to about 60 minutes, such as about any of 15 minutes, 20 minutes, 25 minutes, 30 minutes, 35 minutes, or 40 minutes, wherein the alkylation incubation time is performed at a temperature of about 15° C. to about 30° C., such about any of 20° C., 21° C., 22° C., 23° C., 24° C., 25° C. In some embodiments, the alkylation technique comprises use of an amount (containing solution based on the final concentration in the sample) of an alkylating agent, e.g., IAA, of about 15 mM to about 40 mM, such as any of about 20 mM, 20.5 mM, 21 mM, 21.5 mM, 22 mM, 22.5 mM, 23 mM, 23.5 mM, 24 mM, 24.5 mM, 25 mM, 25.5 mM, 26 mM, 26.5 mM, 27 mM, 27.5 mM, 28 mM, 28.5 mM, 29 mM, 29.5 mM, 30 mM, 30.5 mM, 31 mM, 31.5 mM, 32 mM, 32.5 mM, 33 mM, 33.5 mM, 34 mM, 34.5 mM, 35 mM, 35.5 mM, 36 mM, 36.5 mM, 37 mM, 37.5 mM, 38 mM, and an alkylation incubation time of about 5 minutes to about 60 minutes, such as about any of 15 minutes, 20 minutes, 25 minutes, 30 minutes, 35 minutes, or 40 minutes, wherein the alkylation incubation time is performed at a temperature of about 15° C. to about 30° C., such about any of 20° C., 21° C., 22° C., 23° C., 24° C., or 25° C.

[0330] The alkylation incubation temperature can be controlled by numerous techniques and combinations thereof. In some embodiments, the alkylation incubation temperature is controlled by an ambient temperature, such as room temperature. In some embodiments, the alkylation incubation temperature is controlled by a water bath. In some embodiments, the alkylation incubation temperature is controlled by a heat block. In some embodiments, the alkylation incubation temperature is controlled by a thermocycler, e.g., a thermocycler with a lid temperature control element. As described herein, in some embodiments, control of sample temperature when performed using a thermocycler is via a temperature block element. In some embodiments, temperature changes prior to and/or after the alkylation incubation time temperature are controlled by a technique described herein, such as cooling at room temperature or a ramp rate.

[0331] In some embodiments, the alkylation technique comprises subjecting a sample, or a derivative thereof, e.g., a denatured sample, to a thermal cycle. In some embodiments, the thermal cycle comprises subjecting the sample, or a derivative thereof, to one or more of: (a) a block starting temperature (b) block set temperature (the temperature for the alkylation incubation time); (c) a block ending temperature; (d) one or more ramp rates between temperature changes in the thermal cycle (such as between the block starting temperature and the block set temperature or between the block set temperature and the block ending temperature); and (e) a lid temperature relative to the block temperature. In some embodiments, the thermal cycle is performed, in whole or in part, using a thermocycler. In some embodiments, the thermal cycle is configured to reduce and/or prevent loss of sample, such as by escaping vapor and/or condensation when the sample container is opened. In some embodiments, the thermal cycle comprises a set block temperature of about 15° C. to about 30° C., such as any of 15° C. to about 25° C., about 20° C. to about 30° C., or about 20° C. to about 25° C., including about any of 20° C., 21° C., 22° C., 23° C., 24° C., or 25° C. In some embodiments, the thermal cycle comprises: (a) a set block temperature of about 15° C. to about 30° C., such as any of 15° C. to about 25° C., about 20° C. to about 30° C., or about 20° C. to about 25° C., including about any of 20° C., 21° C., 22° C., 23° C., 24° C., 25° C., and (b) a block ending temperature of about 15° C. to about 35° C., such as any of about 20° C. to about 35° C., or about 20° C. to about 25° C. In some embodiments, the thermal cycle comprises: (a) starting block temperature of about 15° C. to about 30° C., such as any of 15° C. to about 25° C., about 20° C. to about 30° C., or about 20° C. to about 25° C., including about any of 20° C., 21° C., 22° C., 23° C., 24° C., 25° C., (b) a set block temperature of about 15° C. to about 30° C., such as any of 15° C. to about 25° C., about 20° C. to about 30° C., or about 20° C. to about 25° C., including about any of 20° C., 21° C., 22° C., 23° C., 24° C., 25° C., and (c) a block ending temperature of about 15° C. to about 35° C., such as any of about 20° C. to about 35° C., or about 20° C. to about 25° C. In any of the thermal cycles described herein, in some embodiments, the lid temperature during the thermal cycle is configured to reduce and/or inhibit condensate formation near or on the lid of a sample container. In some embodiments, the lid temperature during the thermal cycle is at least about 2° C., such as at least about any of 2.5° C., 3° C., 3.5° C., 4° C., 4.5° C., 5° C., 5.5° C., 6° C., 6.5° C., 7° C., 7.5° C., 8° C., 8.5° C., 9° C., 9.5° C., 10° C., 11° C., 12° C., 13° C., 14° C., 15° C., 16° C., 17° C., 18° C., 19° C., or 20° C., higher than the respective temperature of the block during the thermal cycle. In some embodiments, the lid temperature during at least a portion of a thermal cycle is about 102° C. to about 120° C., such as about any of 103° C., 104° C., 105° C., 106° C., 107° C., 108° C., 109° C., or 110° C.

[0332] In some embodiments, the alkylation technique further comprises quenching the alkylating agent comprising use of a neutralizing agent. In some embodiments, the neutralizing agent is a reducing agent. In some embodiments, the reducing agent is dithiothreitol (DTT), tris(2-carboxyethyl) phosphine (TCEP), beta-mercaptoethanol (BME), or a cysteine, or any mixture thereof. In some embodiments, the neutralizing agent is added in an amount to fully quench the amount of the alkylating agent, such as in an amount greater than or equal to a molar amount of an active moiety of the alkylating agent. In some embodiments, the amount (as assessed based on the final concentration in the sample containing solution) of the neutralizing agent is about 1 mM to about 100 mM.

[0333] In some embodiments, the alkylation technique, in whole or in part, is performed substantially in a low light condition. In some embodiments, the alkylation incubation time is performed in a low light condition. In some embodiments, the low light condition is in the dark or a location substantially devoid of sunlight and/or room lighting, such as in a desk drawer. In some embodiments, the low light condition is a filtered light, such as red light.

[0334] In some embodiments, the alkylating agent is sourced from a stock solution. In some embodiments, the stock solution is prepared within about 1 hour, such as within about any of 50 minutes, 40 minutes, 30 minutes, 20 minutes, or 10 minutes, of use.

[0335] In some embodiments, the ramp rate between a temperature change in a thermal cycle (such as between a block starting temperature and a block set temperature and/or between a block set temperature a the block ending temperature) is about 1° C./second to about 10° C./second, such as any of 1° C./second, 1.5° C./second, 2° C./second, 2.5° C./second, 3° C./second, 3.5° C./second, 4° C./second, 4.5° C./second, 5° C./second, 5.5° C./second, 6° C./second, 6.5° C./second, 7° C./second, 7.5° C./second, 8° C./second, 8.5° C./second, 9° C./second, 9.5° C./second, or 10° C./second.

### IV. Proteolytic Digestion Techniques

[0336] In certain aspects, the methods provided herein comprise performing a proteolytic digestion technique. In some embodiments, the proteolytic digestion technique is performed on a sample, or a derivative thereof, following thermal denaturation and/or any additional steps intended to expose protease cleavage sites. Proteolytic digestion techniques, generally speaking, cleave polypeptides at known cleavage sites. For example, trypsin is a serine protease that generally cleaves polypeptides at the carboxyl side (C-terminal side) of lysine and arginine residues. Certain exceptions apply to the cleavage pattern of trypsin, such as due to proximity of a proline residue and/or a post-translational modification causing steric hindrance relative to the cleavage site. Proteolytic digestion techniques described herein comprise subjecting a sample, or a derivative thereof (e.g., a denatured sample or an alkylated sample, including an alkylated sample subjected to a reduction technique prior to an alkylation technique), to an amount of one or more proteases and incubating for a digestion incubation time performed at a temperature or range thereof.

[0337] In some embodiments, each of the one or more proteases is trypsin, LysC, LysN, AspN, GluC, ArgC, IdeS, IdeZ, PNGase F, thermolysin, pepsin, elastase, TEV, or Factor Xa, or any mixture thereof. In some embodiments, wherein two or more proteases are used, the weight ratio between a first protease and a second protease is about 1:10 to about 10:1, such as about any of about 1:9, 1:8, 1:7: 1:6, 1:5, 1:4, 1:3, 1:2, or 1:1. In some embodiments, the one or more proteases is trypsin. In some embodiments, the one or more proteases is a mixture of trypsin and LysC, such as in a weight ratio of about 1:1. In some embodiments, the one or more proteases is selected based on the type and/or characteristic of a biological sample used in the methods herein. In some embodiments, the biological sample is a plasma sample, wherein the one or more proteases is trypsin and Lys-C, such as in a weight ratio of about 1:1. In some embodiments, the biological sample is a serum sample, wherein the one or more proteases is trypsin. In some embodiments, the protease is a modified protease, such as comprising a modification to prevent or inhibit self-proteolysis. In some embodiments, the modified protease is a modified trypsin, such as a methylated and/or an acetylated trypsin. In some embodiments, the modified trypsin is a tosyl phenylalanyl chloromethyl ketone (TPCK)-treated trypsin.

[0338] In some embodiments, the amount of a protease, e.g., trypsin or LysC, used in a proteolytic digestion technique is based on a weight ratio relative to the polypeptide content of a sample, or a derivative thereof, (i.e., weight of a protease: weight of polypeptide content) of about 1:200 to about 1:10, such as any of about 1:100 to about 1:10, about 1:50 to about 1:10, about 1:40 to about 1:20, about 1:50 to about 1:30, about 1:45 to about 1:35, about 1:20 to about 1:40, about 1:30 to about 1:10, or about 1:25 to about 1:15. In some embodiments, the amount of a protease used in a proteolytic digestion technique is at least about 1:200, such as at least about any of 1:190, 1:180, 1:170, 1:160, 1:150, 1:140, 1:130, 1:120, 1:110, 1:100, 1:95, 1:90, 1:85, 1:80, 1:75, 1:70, 1:65, 1:60, 1:55, 1:50, 1:45, 1:40, 1:35, 1:30, 1:25, 1:20, 1:15, or 1:10. In some embodiments, the amount of a protease used in a proteolytic digestion technique is about 1:10 or less, such as about any of 1:15 or less, 1:20 or less, 1:25 or less, 1:30 or less, 1:35 or less, 1:40 or less, 1:45 or less, 1:50 or less, 1:55 or less, 1:60 or less, 1:65 or less, 1:70 or less, 1:75 or less, 1:80 or less, 1:85 or less, 1:90 or less, 1:95 or less, 1:100 or less, 1:110 or less, 1:120 or less, 1:130 or less, 1:140 or less, 1:150 or less, 1:160 or less, 1:170 or less, 1:180 or less, 1:190 or less, or 1:200 or less. In some embodiments, the amount of a protease used in a proteolytic digestion technique is about any of 1:10, 1:15, 1:20, 1:25, 1:30, 1:35, 1:40, 1:45, 1:50, 1:55, 1:60, 1:65, 1:70, 1:75, 1:80, 1:85, 1:90, 1:95, 1:100, 1:110, 1:120, 1:130, 1:140, 1:150, 1:160, 1:170, 1:180, 1:190, or 1:200. In some embodiments, the proteolytic digestion technique comprises the use of two or more proteases, such as a combination of trypsin and LysC, and in such embodiments, the amount of each protease (such as described above) can be summed to a total amount of proteases used in a proteolytic digestion technique.

[0339] In some embodiments, the proteolytic digestion incubation time is about 20 minutes to about 36 hours, such as any of about 1 hour to about 18 hours, about 5 hours to about 24 hours, about 12 hours to about 24 hours, about 16 hours to about 20 hours, or about 12 hours to about 36 hours. In some embodiments, the proteolytic digestion incubation time is about 36 hours or less, such as about any of 32 hours or less, 30 hours or less, 28 hours or less, 26 hours or less, 24 hours or less, 22 hours or less, 20 hours or less, 19 hours or less, 18 hours or less, 17 hours or less, 16 hours or less, 15 hours or less, 14 hours or less, 13 hours or less, 12 hours or less, 11 hours or less, 10 hours or less, 9 hours or less, 8 hours or less, 7 hours or less, 6 hours or less, 5 hours or less, 4 hours or less, 3 hours or less, 2 hours or less, or 1 hours or less. In some embodiments, the proteolytic digestion incubation time is at least about 20 minutes, such as at least about any of 30 minutes, 40 minutes, 50 minutes, 1 hour, 2 hours, 3 hours, 4 hours, 5 hours, 6 hours, 7 hours, 8 hours, 9 hours, 10 hours, 11 hours, 12 hours, 13 hours, 14 hours, 15 hours, 16 hours, 17 hours, 18 hours, 19 hours, 20 hours, 22 hours, 24 hours, 26 hours, 28 hours, 30 hours, 32 hours, 34 hours, or 36 hours. In some embodiments, the proteolytic digestion incubation time is about any of 20 minutes, 30 minutes, 40 minutes, 50 minutes, 1 hour, 2 hours, 3 hours, 4 hours, 5 hours, 6 hours, 7 hours, 8 hours, 9 hours, 10 hours, 11 hours, 12 hours, 13 hours, 14 hours, 15 hours, 16 hours, 17 hours, 18 hours, 19 hours, 20 hours, 22 hours, 24 hours, 26 hours, 28 hours, 30 hours, 32 hours, 34 hours, or 36 hours.

[0340] In some embodiments, the digestion incubation time is performed at a temperature of about 20° C. to about 60° C., such as any of about 20° C. to about 25° C., about 20° C. to about 30° C., about 25° C. to about 40° C., about 35° C. to about 40° C., or about 35° C. to about 50° C. In some embodiments, the digestion incubation time is performed at a temperature of at least about 20° C., such as at least about any of 21° C., 22° C., 23° C., 24° C., 25° C., 26° C., 27° C., 28° C., 29° C., 30° C., 31° C., 32° C., 33° C., 34° C., 35° C., 36° C., 37° C., 38° C., 39° C., 40° C., 42° C., 44° C., 46° C., 48° C., 50° C., 52° C., 54° C., 56° C., 58° C., or 60° C. In some embodiments, the digestion incubation time is performed at a temperature of about 60° C. or less, such about any of 58° C. or less, 56° C. or less, 54° C. or less, 52° C. or less, 50° C. or less, 48° C. or less, 46° C. or less, 44° C. or less, 42° C. or less, 40° C. or less, 39° C. or less, 38° C. or less, 37° C. or less, 36° C. or less, 35° C. or less, 34° C. or less, 33° C. or less, 32° C. or less, 31° C. or less, 30° C. or less, 29° C. or less, 28° C. or less, 27° C. or less, 26° C. or less, 25° C. or less, 24° C. or less, 23° C. or less, 22° C. or less, 21° C. or less, or 20° C. or less. In some embodiments, the digestion incubation time is performed at a temperature of about any of 20° C., 21° C., 22° C., 23° C., 24° C., 25° C., 26° C., 27° C., 28° C., 29° C., 30° C., 31° C., 32° C., 33° C., 34° C., 35° C., 36° C., 37° C., 38° C., 39° C., 40° C., 42° C., 44° C., 46° C., 48° C., 50° C., 52° C., 54° C., 56° C., 58° C., or 60° C. In some embodiments, the reduction incubation time is performed at a room temperature.

[0341] In some embodiments, the proteolytic digestion technique comprises a digestion incubation time of about 12 hours to about 24 hours, such as about any of 13 hours, 14 hours, 15 hours, 16 hours, 17 hours, 18 hours, 19 hours, 20 hours, 21 hours, 22 hours, 23 hours, wherein the digestion incubation time is performed at a temperature of about 20° C. to about 40° C., such about any of 22° C., 24° C., 26° C., 28° C., 30° C., 31° C., 32° C., 33° C., 34° C., 35° C., 36° C., 37° C., 38° C., 39° C. In some embodiments, the proteolytic digestion technique comprises use of an amount a protease for each of one or more proteases, e.g., trypsin and/or LysC, of about 1:15 to about 1:45, such as about any of 1:20, 1:25, 1:30, 1:35, or 1:40 (as measured based on the amount of the protease to the amount of polypeptide in a sample or a derivative thereof), and a digestion incubation time of about 12 hours to about 24 hours, such as about any of 13 hours, 14 hours, 15 hours, 16 hours, 17 hours, 18 hours, 19 hours, 20 hours, 21 hours, 22 hours, 23 hours, wherein the digestion incubation time is performed at a temperature of about 20° C. to about 40° C., such about any of 22° C., 24° C., 26° C., 28° C., 30° C., 31° C., 32° C., 33° C., 34° C., 35° C., 36° C., 37° C., 38° C., 39° C. In some embodiments, the proteolytic digestion technique is performed on a plasma sample or a derivate thereof, wherein the proteolytic digestion technique comprises a 1:40 ratio of trypsin to polypeptide in the sample of the derivative thereof and a 1:40 ratio of LysC to polypeptide in the sample or the derivative thereof. In some embodiments, the proteolytic digestion technique is performed on a serum sample or a derivate thereof, wherein the proteolytic digestion technique comprises a 1:20 ratio of trypsin.

[0342] The digestion incubation temperature can be controlled by numerous techniques and combinations thereof. In some embodiments, the digestion incubation temperature is controlled by an ambient temperature, such as room temperature. In some embodiments, the digestion incubation temperature is controlled by a water bath. In some embodiments, the digestion incubation temperature is controlled by a heat block. In some embodiments, the digestion incubation temperature is controlled by a thermocycler, e.g., a thermocycler with a lid temperature control element. As described herein, in some embodiments, control of sample temperature when performed using a thermocycler is via a temperature block element. In some embodiments, temperature changes prior to and/or after the digestion incubation time temperature are controlled by a technique described herein, such as cooling at room temperature or a ramp rate.

[0343] In some embodiments, the proteolytic digestion technique comprises subjecting a sample, or a derivative thereof, e.g., an alkylated sample (including an alkylated sample quenched with a neutralizing agent), to a thermal cycle. In some embodiments, the thermal cycle comprises subjecting the sample, or a derivative thereof, to one or more of: (a) a block starting temperature (b) block set temperature (the temperature for the digestion incubation time); (c) a block ending temperature; (d) one or more ramp rates between temperature changes in the thermal cycle (such as between the block starting temperature and the block set temperature or between the block set temperature and the block ending temperature); and (e) a lid temperature relative to the block temperature. In some embodiments, the thermal cycle is performed, in whole or in part, using a thermocycler. In some embodiments, the thermal cycle is configured to reduce and/or prevent loss of sample, such as by escaping vapor and/or condensation when the sample container is opened. In some embodiments, the thermal cycle comprises a set block temperature of about 20° C. to about 50° C., including about any of 22° C., 24° C., 26° C., 28° C., 30° C., 31° C., 32° C., 33° C., 34° C., 35° C., 36° C., 37° C., 38° C., 39° C., 40° C., 42° C., 44° C., 46° C., 48° C.

[0344] In some embodiments, the thermal cycle comprises: (a) a set block temperature of about 20° C. to about 50° C., including about any of 22° C., 24° C., 26° C., 28° C., 30° C., 31° C., 32° C., 33° C., 34° C., 35° C., 36° C., 37° C., 38° C., 39° C., 40° C., 42° C., 44° C., 46° C., 48° C., and (b) a block ending temperature of about 15° C. to about 35° C., such as any of about 20° C. to about 35° C., or about 20° C. to about 25° C. In some embodiments, the thermal cycle comprises: (a) starting block temperature of about 15° C. to about 35° C., such as any of about 20° C. to about 35° C., or about 20° C. to about 25° C., (b) a set block temperature of about 20° C. to about 50° C., including about any of 22° C., 24° C., 26° C., 28° C., 30° C., 31° C., 32° C., 33° C., 34° C., 35° C., 36° C., 37° C., 38° C., 39° C., 40° C., 42° C., 44° C., 46° C., 48° C., and (c) a block ending temperature of about 15° C. to about 35° C., such as any of about 20° C. to about 35° C., or about 20° C. to about 25° C. In any of the thermal cycles described herein, in some embodiments, the lid temperature during the thermal cycle is configured to reduce and/or inhibit condensate formation near or on the lid of a sample container. In some embodiments, the lid temperature during the thermal cycle is at least about 2° C., such as at least about any of 2.5° C., 3° C., 3.5° C., 4° C., 4.5° C., 5° C., 5.5° C., 6° C., 6.5° C., 7° C., 7.5° C., 8° C., 8.5° C., 9° C., 9.5° C., 10° C., 11° C., 12° C., 13° C., 14° C., 15° C., 16° C., 17° C., 18° C., 19° C., or 20° C., higher than the respective temperature of the block during the thermal cycle. In some embodiments, the lid temperature during at least a portion of a thermal cycle is about 102° C. to about 120° C., such as about any of 103° C., 104° C., 105° C., 106° C., 107° C., 108° C., 109° C., or 110° C.

[0345] In some embodiments, the ramp rate between a temperature change in a thermal cycle (such as between a block starting temperature and a block set temperature and/or between a block set temperature a the block ending temperature) is about 1° C./second to about 10° C./second, such as any of 1° C./second, 1.5° C./second, 2° C./second, 2.5° C./second, 3° C./second, 3.5° C./second, 4° C./second, 4.5° C./second, 5° C./second, 5.5° C./second, 6° C./second, 6.5° C./second, 7° C./second, 7.5° C./second, 8° C./second, 8.5° C./second, 9° C./second, 9.5° C./second, or 10° C./second.

[0346] In some embodiments, the proteolytic digestion technique further comprises quenching the one or more proteolytic enzymes. In some embodiments, quenching the one or more proteolytic enzymes comprises denaturing the one or more proteolytic enzymes. In some embodiments, quenching the one or more proteolytic enzymes comprise adding an amount of an acid. In some embodiments, the acid is formic acid (FA) or trifluoroacetic acid (TFA), or a mixture thereof. In some embodiments, the amount (as assessed based on the final concentration in the sample containing solution) of the acid added is about any of 0.1% v/v, 0.2% v/v, 0.3% v/v, 0.4% v/v, 0.5% v/v, 0.6% v/v, 0.7% v/v, 0.8% v/v, 0.9% v/v, 1% v/v, 1.1% v/v, 1.2% v/v, 1.3% v/v, 1.4% v/v, 1.5% v/v, 1.6% v/v, 1.7% v/v, 1.8% v/v, 1.9% v/v, or 2% v/v.

### V. Additional Techniques

[0347] In certain aspects, the method provided herein comprise subjecting the proteolytically digested sample comprising a proteolytic glycopeptide to one or more additional steps prior to subjecting the proteolytically digested sample, or a derivative thereof, to a liquid chromatography-mass spectrometry (LC-MS) technique using a liquid chromatography system and a mass spectrometer. In some embodiments, the LC system is online with the MS (i.e., eluate from the LC system is directly introduced to the MS). In some embodiments, the one or more additional steps do not include a desalting step performed outside of the LC system (such as an offline desalting technique).

[0348] In some embodiments, the method further comprises adding a standard to the proteolytically digested sample prior to the LC-MS technique. In some embodiments, the standard is a stable isotope-internal standard (SI-IS) peptide mixture.

[0349] In some embodiments, the biological sample is not subjected to a high-abundant protein depletion technique prior to the thermal denaturation technique. For example, in some embodiments, the high-abundant protein depletion technique removes highly abundant proteins present in a blood sample, such as serum albumin.

### D. Methods for Performing a LC-MS Analysis of a Proteolytic Glycopeptide

[0350] In certain aspects, provided herein is a method for performing a LC-MS analysis on a sample comprising a proteolytic glycopeptide. In some embodiments, the liquid chromatography (LC) system is online with a mass spectrometer (i.e., proteolytic peptide species, including glycopeptides, are eluted from the LC system directing into the mass spectrometer via a mass spectrometer interface. In some embodiments, the LC technique comprises performing a chromatographic separation of one or more proteolytic peptides, including glycopeptides. In some embodiments, the one or more proteolytic peptides subjected to a chromatographic separation are obtained from a proteolytically digested sample, such as described herein. In some embodiments, the chromatographic separation is performed on a proteolytically digested sample, such as described herein, (e.g., no additional separation technique, such as a sample clean-up step, is performed to remove one or more components from proteolytically digested sample). In some embodiments, the chromatographic separation is performed on a proteolytically digested sample comprising at least about 5 mM of a buffer, such as ammonium bicarbonate. In some embodiments, the chromatographic separation is performed on a proteolytically digested sample comprising an amount, such as at least about 1 mM, of a reducing agent or a byproduct thereof, such as a stable six-membered ring with an internal disulfide bond derived from DTT. In some embodiments, the chromatographic separation is performed on a proteolytically digested sample comprising an amount, such as at least about 1 mM, of an alkylating agent or a byproduct thereof, such as iodide (I-) derived from IAA. Under certain circumstances depending on the liquid pH, DTT, the six-membered ring with an internal disulfide bond, IAA, and I may be in an ionic form and can be referred to as a salt. In addition, the salt can be a non-volatile salt that is less likely to vaporize upon entering the MS increasing the likelihood of a contaminating residue in the MS causing the need for a cleaning maintenance.

[0351] In some embodiments, the method comprises introducing the proteolytically digested sample to a LC-MS system. In some embodiments, the method comprises performing a chromatographic separation of the proteolytically digested sample. In some embodiments, the chromatography separation comprises a period of diversion (i.e., diverted from the mass spectrometer interface, e.g., to a waste receptacle) of an initial eluate from the proteolytically digested sample. In some embodiments, the initial eluate (as assessed from the sample front) diverted from the mass spectrometer is about 1 column volume of the chromatographic column to about 5 column volumes of the chromatographic column, such as any of about 1 column volumes to about 4 column volumes, about 2 column volumes to about 5 column volumes, or about 3 column volumes to about 4 column volumes. In some embodiments, the initial eluate (as assessed from the sample front) diverted from the mass spectrometer is at least about 0.5 column volumes, such as at least about any of 1 column volume, 1.5 column volumes, 2 column volumes, 2.5 column volumes, 3 column volumes, 3.5 column volumes, 4 column volumes, 4.5 column volumes, or 5 column volumes. In some embodiments, the initial eluate (as assessed from the sample front) diverted from the mass spectrometer is about 5 column volumes or less, such as about any of 4.5 column volumes or less, 4 column volumes or less, 3.5 column volumes or less, 3 column volumes or less, 2.5 column volumes or less, 2 column volumes or less, 1.5 column volumes or less, 1 column volume or less, or 0.5 column volumes or less. In some embodiments, the initial eluate (as assessed from the sample front) diverted from the mass spectrometer is about any of 0.5 column volumes, 1 column volume, 1.5 column volumes, 2 column volumes, 2.5 column volumes, 3 column volumes, 3.5 column volumes, 4 column volumes, 4.5 column volumes, or 5 column volumes.

[0352] In some embodiments, the chromatographic separation comprises a gradient separation performing using mixtures of an aqueous mobile phase and an organic mobile phase. In some embodiments, the chromatographic separation comprises isocratic period, such as a period of at least about 90%, such as at least about any of 91%, 92%, 93%, 94%, 95%, 96%, 97%, 98%, 99%, or 100%, of an aqueous mobile phase to produce the initial eluate that is diverted from the mass spectrometer interface.

[0353] In some embodiments, the LC system comprises a reversed-phase chromatography column. In some embodiments, the reversed-phase column comprises an alkyl moiety, such as C18.

[0354] The present application contemplates a diverse array of additional features of LC-MS techniques for analyzing a sample comprising a glycopeptide using a mass spectrometer. In some embodiments, the liquid chromatography system comprises a high performance liquid chromatography system. In some embodiments, the liquid chromatography system comprises an ultra-high performance liquid chromatography system. In some embodiments, the liquid chromatography system comprises a high-flow liquid chromatography system. In some embodiments, the liquid chromatography system comprises a low-flow liquid chromatography system, such as a micro-flow liquid chromatography system or a nano-flow liquid chromatography system. In some embodiments, the liquid chromatography system is coupled, such as directly interfaced, with a mass spectrometer.

[0355] In some embodiment, the mass spectrometry technique comprises an ionization technique. Ionization techniques contemplated by the present application include techniques capable of charging polypeptides and peptide products, including glycopeptides. Thus, in some embodiments, the ionization technique is electrospray ionization. In some embodiments, the ionization technique is nano-electrospray ionization. In some embodiments, the ionization technique is atmospheric pressure chemical ionization. In some embodiments, the ionization technique is atmospheric pressure photoionization.

[0356] A diverse array of mass spectrometers are contemplated as compatible with the description, include high-resolution mass spectrometers and low-resolution mass spectrometers. In some embodiments, the mass spectrometer is a time-of-flight (TOF) mass spectrometer. In some embodiments, the mass spectrometer is a quadrupole time-of-flight (Q-TOF) mass spectrometer. In some embodiments, the mass spectrometer is a quadrupole ion trap time-of-flight (QIT-TOF) mass spectrometer. In some embodiments, the mass spectrometer is an ion trap. In some embodiments, the mass spectrometer is a single quadrupole. In some embodiments, the mass spectrometer is a triple quadrupole (QQQ). In some embodiments, the mass spectrometer is an orbitrap. In some embodiments, the mass spectrometer is a quadrupole orbitrap. In some embodiments, the mass spectrometer is a fourier transform ion cyclotron resonance (FT) mass spectrometer. In some embodiments, the mass spectrometer is a quadrupole fourier transform ion cyclotron resonance (Q-FT) mass spectrometer. In some embodiments, the mass spectrometry technique comprises positive ion mode. In some embodiments, the mass spectrometry technique comprises negative ion mode. In some embodiments, the mass spectrometry technique comprises an ion mobility mass spectrometry technique.

[0357] In some embodiments, the LC-MS technique comprises processing obtained signals MS from the mass spectrometer. In some embodiments, the LC-MS technique comprises peak detection. In some embodiments, the LC-MS technique comprises determining ionization intensity of an ionized peptide product. In some embodiments, the LC-MS technique comprises determining peak height of an ionized peptide product. In some embodiments, the LC-MS technique comprises determining peak area of an ionized peptide product. In some embodiments, the LC-MS technique comprises determining peak volume of an ionized peptide product. In some embodiments, the LC-MS technique comprises identifying an ionized peptide product by amino acid sequence. In some embodiments, the LC-MS technique comprises determining the site of a post-translational modification of an ionized peptide, such as the site of a glycosylation. In some embodiments, the LC-MS technique comprises determining the glycan structure, or a characteristic thereof, of an ionized peptide product. In some embodiments, the LC-MS technique comprises manually validating the ionized peptide product acid sequence assignments. In some embodiments, the LC-MS technique comprises a quantification technique.

### E. Exemplary Methods

[0358] In some aspects, provided herein is a method for proteolytically digesting a biological sample comprising a glycoprotein to produce a proteolytic glycopeptide, the method comprising: subjecting the biological sample to a thermal denaturation technique to produce a denatured sample, wherein the thermal denaturation technique comprises subjecting the biological sample to a first thermal cycle comprising a thermal treatment of about 60° C. to about 100° C. with a hold time of at least about 1 minute, wherein the lid temperature during the first thermal cycle is the same or greater than (e.g., 0° C. to up to 20° C. greater than) the temperature of the block temperature during the first thermal cycle, such as at least about 2° C. higher than the temperature of the block temperature during the first thermal cycle, including about 5° C. to about 20° C. higher than the temperature of the block temperature during the first thermal cycle; subjecting the denatured sample to a reduction technique to produce a reduced sample, wherein the reduction technique comprises adding an amount of a reducing agent to the denatured sample and incubating for a reducing incubation time; subjecting the reduced sample to an alkylation technique to produce an alkylated sample, wherein the alkylation technique comprises adding an amount of an alkylating agent to the reduced sample and incubating substantially in the dark or in a low light condition for an alkylation incubation time, and wherein the alkylated technique comprises quenching the alkylating agent following the alkylation incubation time; and subjecting the alkylated sample to a proteolytic digestion technique to produce a proteolytically digested sample comprising the proteolytic glycopeptide, wherein the proteolytic digestion technique comprises adding an amount of one or more proteolytic enzymes and incubating for a digestion incubation time, and wherein the proteolytic digestion technique comprises quenching the one or more proteolytic enzymes following the digestion incubation time. In some embodiments, the first thermal cycle of the thermal denaturation technique comprises: (a) starting block temperature of about 15° C. to about 50° C., such as any of 15° C. to about 25° C., about 20° C. to about 30° C., or about 20° C. to about 25° C., including about any of 20° C., 21° C., 22° C., 23° C., 24° C., 25° C., (b) a set block temperature of about 60° C. to about 100° C., such about any of 60° C., 65° C., 70° C., 75° C., 80° C., 85° C., 90° C., 91° C., 92° C., 93° C., 94° C., 95° C., 96° C., 97° C., 98° C., 99° C., or 100° C., and (c) a block ending temperature of about 15° C. to about 35° C., such as any of about 20° C. to about 35° C., or about 20° C. to about 25° C. In some embodiments, the reduction technique comprises use of an amount (as assessed based on the final concentration in the sample containing solution) of a reducing agent, e.g., DTT, of about 5 mM to about 25 mM, such as any of about 6 mM, 7 mM, 8 mM, 9 mM, 10 mM, 11 mM, 12 mM, 13 mM, 14 mM, 15 mM, 16 mM, 17 mM, 18 mM, 19 mM, 20 mM, 21 mM, 22 mM, 23 mM, or 24 mM, and a reduction incubation time of about 30 minutes to about 70 minutes, such as about any of 35 minutes, 40 minutes, 45 minutes, 50 minutes, 55 minutes, 60 minutes, or 65 minutes, wherein the reduction incubation time is performed at a temperature of about 50° C. to about 70° C., such about any of 55° C., 60° C., or 65° C. In some embodiments, the reduction technique comprises subjecting the denatured sample to a second thermal cycle to control temperature. In some embodiments, the second thermal cycle of the reduction technique comprises: (a) starting block temperature of about 15° C. to about 60° C., such as any of about 15° C. to about 50° C., about 20° C. to about 40° C., about 20° C. to about 30° C., or about 20° C. to about 25° C., (b) a set block temperature of about 20° C. to about 100° C., such as any of about 40° C. to about 80° C., about 50° C. to about 70° C., about 50° C. to about 60° C., about 55° C. to about 65° C., or about 60° C. to about 70° C., including about any of 50° C., 55° C., 60° C., 65° C., or 70° C., and (c) a block ending temperature of about 15° C. to about 35° C., such as any of about 20° C. to about 35° C., or about 20° C. to about 25° C. In some embodiments, the alkylation technique comprises use of an amount (containing solution based on the final concentration in the sample) of an alkylating agent, e.g., IAA, of about 15 mM to about 40 mM, such as any of about 20 mM, 20.5 mM, 21 mM, 21.5 mM, 22 mM, 22.5 mM, 23 mM, 23.5 mM, 24 mM, 24.5 mM, or 25 mM, 26 mM, 27 mM, 28 mM, 29 mM, 30 mM, 31 mM, 32 mM, 33 mM, 34 mM, or 35 mM, and an alkylation incubation time of about 5 minutes to about 60 minutes, such as about any of 15 minutes, 20 minutes, 25 minutes, 30 minutes, 35 minutes, or 40 minutes, wherein the alkylation incubation time is performed at a temperature of about 15° C. to about 30° C., such about any of 20° C., 21° C., 22° C., 23° C., 24° C., or 25° C. In some embodiments, the alkylation technique comprises subjecting the reduced sample to a third thermal cycle to control temperature. In some embodiments, the third thermal cycle of the alkylation technique comprises: (a) starting block temperature of about 15° C. to about 30° C., such as any of 15° C. to about 25° C., about 20° C. to about 30° C., or about 20° C. to about 25° C., including about any of 20° C., 21° C., 22° C., 23° C., 24° C., 25° C., (b) a set block temperature of about 15° C. to about 30° C., such as any of 15° C. to about 25° C., about 20° C. to about 30° C., or about 20° C. to about 25° C., including about any of 20° C., 21° C., 22° C., 23° C., 24° C., 25° C., and (c) a block ending temperature of about 15° C. to about 35° C., such as any of about 20° C. to about 35° C., or about 20° C. to about 25° C. In some embodiments, the proteolytic digestion technique comprises use of an amount a protease for each of one or more proteases, e.g., trypsin and/or LysC, of about 1:15 to about 1:45, such as about any of 1:20, 1:25, 1:30, 1:35, or 1:40, and a digestion incubation time of about 12 hours to about 24 hours, such as about any of 13 hours, 14 hours, 15 hours, 16 hours, 17 hours, 18 hours, 19 hours, 20 hours, 21 hours, 22 hours, 23 hours, wherein the digestion incubation time is performed at a temperature of about 20° C. to about 40° C., such about any of 22° C., 24° C., 26° C., 28° C., 30° C., 31° C., 32° C., 33° C., 34° C., 35° C., 36° C., 37° C., 38° C., 39° C. In some embodiments, the proteolytic digestion technique comprises subjecting the alkylated sample to a fourth thermal cycle to control temperature. In some embodiments, the fourth thermal cycle of the proteolytic digestion comprises: (a) starting block temperature of about 15° C. to about 35° C., such as any of about 20° C. to about 35° C., or about 20° C. to about 25° C., (b) a set block temperature of about 20° C. to about 50° C., including about any of 22° C., 24° C., 26° C., 28° C., 30° C., 31° C., 32° C., 33° C., 34° C., 35° C., 36° C., 37° C., 38° C., 39° C., 40° C., 42° C., 44° C., 46° C., 48° C., and (c) a block ending temperature of about 15° C. to about 35° C., such as any of about 20° C. to about 35° C., or about 20° C. to about 25° C. It is to be noted that step numbering, such as first, second, third, and fourth thermal cycle, is not intended to suggest an order of performing the steps described herein.

[0359] In other aspects, provided herein is a method for performing a liquid chromatography-mass spectrometry analysis of a proteolytic glycopeptide derived from a biological sample comprising a glycoprotein, the method comprising: subjecting the biological sample to a thermal denaturation technique to produce a denatured sample followed by a proteolytic digestion technique to produce a proteolytically digested sample comprising the glycopeptide, wherein the thermal denaturation technique subjects the biological sample to a thermal cycle comprising a thermal treatment of about 60° C. to about 100° C. with a hold time of at least about 1 minute, wherein the lid temperature during the thermal cycle is the same or greater than (e.g., 0° C. to up to 20° C. greater than) the temperature of the block temperature during the thermal cycle, such as at least about 2° C. higher than the temperature of the block temperature during the thermal cycle, including about 5° C. to about 20° C. higher than the temperature of the block temperature during the first thermal cycle, wherein the proteolytic digestion technique comprises adding an amount of one or more proteolytic enzymes and incubating for a digestion incubation time, and wherein the digestion technique comprises quenching the one or more proteolytic enzymes following the digestion incubation time; introducing the proteolytically digested sample to a liquid chromatography (LC) system of a LC-MS system; and performing a LC separation to introduce the proteolytic glycopeptide to a mass spectrometer (MS) system, wherein the LC separation comprises a period of diversion of an initial eluate comprising a buffer salt, and wherein the LC system comprises a reversed-phase chromatography column. In some embodiments, the thermal denaturation technique comprises subjecting the biological sample, or a derivative thereof, to a first thermal cycle to control temperature. In some embodiments, the first thermal cycle of the thermal denaturation technique comprises: (a) starting block temperature of about 15° C. to about 50° C., such as any of 15° C. to about 25° C., about 20° C. to about 30° C., or about 20° C. to about 25° C., including about any of 20° C., 21° C., 22° C., 23° C., 24° C., 25° C., (b) a set block temperature of about 60° C. to about 100° C., such about any of 60° C., 65° C., 70° C., 75° C., 80° C., 85° C., 90° C., 91° C., 92° C., 93° C., 94° C., 95° C., 96° C., 97° C., 98° C., 99° C., or 100° C., and (c) a block ending temperature of about 15° C. to about 35° C., such as any of about 20° C. to about 35° C., or about 20° C. to about 25° C. In some embodiments, the proteolytic digestion technique comprises use of an amount a protease for each of one or more proteases, e.g., trypsin and/or LysC, of about 1:15 to about 1:45, such as about any of 1:20, 1:25, 1:30, 1:35, or 1:40, and a digestion incubation time of about 12 hours to about 24 hours, such as about any of 13 hours, 14 hours, 15 hours, 16 hours, 17 hours, 18 hours, 19 hours, 20 hours, 21 hours, 22 hours, 23 hours, wherein the digestion incubation time is performed at a temperature of about 20° C. to about 40° C., such about any of 22° C., 24° C., 26° C., 28° C., 30° C., 31° C., 32° C., 33° C., 34° C., 35° C., 36° C., 37° C., 38° C., 39° C. In some embodiments, the proteolytic digestion technique comprises subjecting the alkylated sample to a second thermal cycle to control temperature. In some embodiments, the second thermal cycle of the proteolytic digestion comprises: (a) starting block temperature of about 15° C. to about 35° C., such as any of about 20° C. to about 35° C., or about 20° C. to about 25° C., (b) a set block temperature of about 20° C. to about 50° C., including about any of 22° C., 24° C., 26° C., 28° C., 30° C., 31° C., 32° C., 33° C., 34° C., 35° C., 36° C., 37° C., 38° C., 39° C., 40° C., 42° C., 44° C., 46° C., 48° C., and (c) a block ending temperature of about 15° C. to about 35° C., such as any of about 20° C. to about 35° C., or about 20° C. to about 25° C. In some embodiments, the chromatography separation comprises a period of diversion (i.e., diverted from the mass spectrometer interface, e.g., to a waste receptacle) of an initial eluate from the proteolytically digested sample. In some embodiments, the initial eluate (as assessed from the sample front) diverted from the mass spectrometer is about 1 column volume to about 5 column volumes, including about any of 0.5 column volumes, 1 column volume, 1.5 column volumes, 2 column volumes, 2.5 column volumes, 3 column volumes, 3.5 column volumes, 4 column volumes, 4.5 column volumes, or 5 column volumes. It is to be noted that step numbering, such as first and second thermal cycle, is not intended to suggest an order of performing the steps described herein.

[0360] In some aspects, provided herein is a method for performing a LC-MS analysis of a proteolytic glycopeptide derived from a biological sample comprising a glycoprotein, the method comprising: subjecting the biological sample to a thermal denaturation technique to produce a denatured sample, wherein the thermal denaturation technique comprises subjecting the biological sample to a first thermal cycle comprising a thermal treatment of about 60° C. to about 100° C. with a hold time of at least about 1 minute, wherein the lid temperature during the first thermal cycle is the same or greater than (e.g., 0° C. to up to 20° C. greater than) the temperature of the block temperature during the first thermal cycle, such as at least about 2° C. higher than the temperature of the block temperature during the first thermal cycle, including about 5° C. to about 20° C. higher than the temperature of the block temperature during the first thermal cycle; subjecting the denatured sample to a reduction technique to produce a reduced sample, wherein the reduction technique comprises adding an amount of a reducing agent to the denatured sample and incubating for a reducing incubation time; subjecting the reduced sample to an alkylation technique to produce an alkylated sample, wherein the alkylation technique comprises adding an amount of an alkylating agent to the reduced sample and incubating substantially in the dark or in a low light condition for an alkylation incubation time, and wherein the alkylated technique comprises quenching the alkylating agent following the alkylation incubation time; subjecting the alkylated sample to a proteolytic digestion technique to produce a proteolytically digested sample comprising the proteolytic glycopeptide, wherein the proteolytic digestion technique comprises adding an amount of one or more proteolytic enzymes and incubating for a digestion incubation time, and wherein the proteolytic digestion technique comprises quenching the one or more proteolytic enzymes following the digestion incubation time; and introducing the proteolytically digested sample to a liquid chromatography (LC) system of a LC-MS system; and performing a LC separation to introduce the proteolytic glycopeptide to a mass spectrometer (MS) system, wherein the LC separation comprises a period of diversion of an initial eluate comprising a buffer salt, and wherein the LC system comprises a reversed-phase chromatography column. In some embodiments, the first thermal cycle of the thermal denaturation technique comprises: (a) starting block temperature of about 15° C. to about 50° C., such as any of 15° C. to about 25° C., about 20° C. to about 30° C., or about 20° C. to about 25° C., including about any of 20° C., 21° C., 22° C., 23° C., 24° C., 25° C., (b) a set block temperature of about 60° C. to about 100° C., such about any of 60° C., 65° C., 70° C., 75° C., 80° C., 85° C., 90° C., 91° C., 92° C., 93° C., 94° C., 95° C., 96° C., 97° C., 98° C., 99° C., or 100° C., and (c) a block ending temperature of about 15° C. to about 35° C., such as any of about 20° C. to about 35° C., or about 20° C. to about 25° C. In some embodiments, the reduction technique comprises use of an amount (as assessed based on the final concentration in the sample containing solution) of a reducing agent, e.g., DTT, of about 5 mM to about 25 mM, such as any of about 6 mM, 7 mM, 8 mM, 9 mM, 10 mM, 11 mM, 12 mM, 13 mM, 14 mM, 15 mM, 16 mM, 17 mM, 18 mM, 19 mM, 20 mM, 21 mM, 22 mM, 23 mM, or 24 mM, and a reduction incubation time of about 30 minutes to about 70 minutes, such as about any of 35 minutes, 40 minutes, 45 minutes, 50 minutes, 55 minutes, 60 minutes, or 65 minutes, wherein the reduction incubation time is performed at a temperature of about 50° C. to about 70° C., such about any of 55° C., 60° C., or 65° C. In some embodiments, the reduction technique comprises subjecting the denatured sample to a second thermal cycle to control temperature. In some embodiments, the second thermal cycle of the reduction technique comprises: (a) starting block temperature of about 15° C. to about 60° C., such as any of about 15° C. to about 50° C., about 20° C. to about 40° C., about 20° C. to about 30° C., or about 20° C. to about 25° C., (b) a set block temperature of about 20° C. to about 100° C., such as any of about 40° C. to about 80° C., about 50° C. to about 70° C., about 50° C. to about 60° C., about 55° C. to about 65° C., or about 60° C. to about 70° C., including about any of 50° C., 55° C., 60° C., 65° C., or 70° C., and (c) a block ending temperature of about 15° C. to about 35° C., such as any of about 20° C. to about 35° C., or about 20° C. to about 25° C. In some embodiments, the alkylation technique comprises use of an amount (containing solution based on the final concentration in the sample) of an alkylating agent, e.g., IAA, of about 15 mM to about 40 mM, such as any of about 20 mM, 20.5 mM, 21 mM, 21.5 mM, 22 mM, 22.5 mM, 23 mM, 23.5 mM, 24 mM, 24.5 mM, or 25 mM, 26 mM, 27 mM, 28 mM, 29 mM, 30 mM, 31 mM, 32 mM, 33 mM, 34 mM, or 35 mM, and an alkylation incubation time of about 5 minutes to about 60 minutes, such as about any of 15 minutes, 20 minutes, 25 minutes, 30 minutes, 35 minutes, or 40 minutes, wherein the alkylation incubation time is performed at a temperature of about 15° C. to about 30° C., such about any of 20° C., 21° C., 22° C., 23° C., 24° C., or 25° C. In some embodiments, the alkylation technique comprises subjecting the reduced sample to a third thermal cycle to control temperature. In some embodiments, the third thermal cycle of the alkylation technique comprises: (a) starting block temperature of about 15° C. to about 30° C., such as any of 15° C. to about 25° C., about 20° C. to about 30° C., or about 20° C. to about 25° C., including about any of 20° C., 21° C., 22° C., 23° C., 24° C., 25° C., (b) a set block temperature of about 15° C. to about 30° C., such as any of 15° C. to about 25° C., about 20° C. to about 30° C., or about 20° C. to about 25° C., including about any of 20° C., 21° C., 22° C., 23° C., 24° C., 25° C., and (c) a block ending temperature of about 15° C. to about 35° C., such as any of about 20° C. to about 35° C., or about 20° C. to about 25° C. In some embodiments, the proteolytic digestion technique comprises use of an amount a protease for each of one or more proteases, e.g., trypsin and/or LysC, of about 1:15 to about 1:45, such as about any of 1:20, 1:25, 1:30, 1:35, or 1:40, and a digestion incubation time of about 12 hours to about 24 hours, such as about any of 13 hours, 14 hours, 15 hours, 16 hours, 17 hours, 18 hours, 19 hours, 20 hours, 21 hours, 22 hours, 23 hours, wherein the digestion incubation time is performed at a temperature of about 20° C. to about 40° C., such about any of 22° C., 24° C., 26° C., 28° C., 30° C., 31° C., 32° C., 33° C., 34° C., 35° C., 36° C., 37° C., 38° C., 39° C. In some embodiments, the proteolytic digestion technique comprises subjecting the alkylated sample to a fourth thermal cycle to control temperature. In some embodiments, the fourth thermal cycle of the proteolytic digestion comprises: (a) starting block temperature of about 15° C. to about 35° C., such as any of about 20° C. to about 35° C., or about 20° C. to about 25° C., (b) a set block temperature of about 20° C. to about 50° C., including about any of 22° C., 24° C., 26° C., 28° C., 30° C., 31° C., 32° C., 33° C., 34° C., 35° C., 36° C., 37° C., 38° C., 39° C., 40° C., 42° C., 44° C., 46° C., 48° C., and (c) a block ending temperature of about 15° C. to about 35° C., such as any of about 20° C. to about 35° C., or about 20° C. to about 25° C. In some embodiments, the chromatography separation comprises a period of diversion (i.e., diverted from the mass spectrometer interface, e.g., to a waste receptacle) of an initial eluate from the proteolytically digested sample. In some embodiments, the initial eluate (as assessed from the sample front) diverted from the mass spectrometer is about 1 column volume to about 5 column volumes, including about any of 0.5 column volumes, 1 column volume, 1.5 column volumes, 2 column volumes, 2.5 column volumes, 3 column volumes, 3.5 column volumes, 4 column volumes, 4.5 column volumes, or 5 column volumes. It is to be noted that step numbering, such as first and second thermal cycle, is not intended to suggest an order of performing the steps described herein. In some embodiments, the method does not include use of a separate clean-up step performed prior to the LC-MS technique, such as a desalting step. It is to be noted that step numbering, such as first, second, third, and fourth thermal cycle, is not intended to suggest an order of performing the steps described herein.

### F. Samples and Components Thereof

[0361] The methods provided herein are contemplated to be suitable for analyzing a diverse array of samples, such as biological samples. In some embodiments, the sample is a blood sample, such as a whole blood sample. In some embodiments, the sample is a plasma sample. In some embodiments, the sample is a serum sample. In some embodiments, the sample is a tissue sample. Plasma is a fluid component of blood that is obtained when a clotting-prevention agent is added to whole blood and then the tube is centrifuged to separate the cellular material. The upper lighter colored liquid layer in the tube is removed as plasma. Common anti-coagulant agents are EDTA (ethylenediaminetetraacetic acid), heparin, and citrate. Serum is a fluid obtained when whole blood is allowed to clot in a tube and then centrifuged so that the clotted blood, including red cells, are at the bottom of the collection tube, leaving a straw-colored liquid above the clot. The straw-colored liquid in the tube is removed as serum.

[0362] The methods provided herein are particularly useful for the analysis of biological samples comprising a glycoprotein, such as to generate glycopeptide containing specimens for analysis with a mass spectrometer. The methods provided herein, in some embodiments, enable the analysis of glycopeptides that elute during early or late phases of a reversed-phase chromatographic separation and are typically missed during conventional mass spectrometry approaches. For the situation where a sample contains hydrophilic salts and hydrophilic glycopeptides, it can be challenging to desalt the sample with a C18 sample phase extraction material without removing a significant portion of the hydrophilic glycopeptides that are needed for an analysis of the sample. For example, glycopeptides with an overall hydrophilic character may elute from a reversed-phase material, such as in a desalting column, and are washed away or not introduced to the mass spectrometer during a data acquisition phase of a mass spectrometry technique. In some embodiments, glycopeptides with an overall hydrophobic character may have a high affinity for a reversed-phase material, such as in a desalting column or a chromatography column, and are not properly eluted from a desalting column or during a data acquisition portion of a mass spectrometry technique.

[0363] In some embodiments, the method comprises an upstream sample preparation technique, such as for obtaining plasma or serum from a blood sample, performed prior to methods for proteolytically digesting a sample. In some embodiments, the upstream sample preparation technique comprises a cell lysis step. In some embodiments, the upstream sample preparation technique comprises a filtration step. In some embodiments, the upstream sample preparation technique comprises a dilution step. In some embodiments, the upstream sample preparation technique comprises a protein concentration determination step.

[0364] In some embodiments, the sample is obtained from an individual. In some embodiments, the sample is obtained from a human individual.

### G. Systems, Kits, and Compositions

[0365] In certain aspects, contemplated herein are systems, kits, and compositions useful for performing the methods described herein. In some embodiments, provided herein is a system, kit, and/or composition useful for performing a proteolytic digestion of a biological sample comprising a glycoprotein as described herein. In some embodiments, provided herein is a system, kit, and/or composition useful for performing a LC-MS analysis of a proteolytic glycopeptide as described herein. In some embodiments, provided herein is a system, kit, and/or composition useful for performing a proteolytic digestion of a biological sample comprising a glycoprotein followed by LC-MS analysis of the proteolytic glycopeptide produced therefrom.

[0366] The present invention is not intended to be limited in scope to the particular disclosed embodiments, which are provided, for example, to illustrate various aspects of the invention. Various modifications to the compositions and methods described will become apparent from the description and teachings herein. Such variations may be practiced without departing from the true scope and spirit of the disclosure and are intended to fall within the scope of the present disclosure.

### Section 2—Reversed-Phase Proteolytic Digestion Clean-Up Techniques for Samples Containing a Glycosylated Polypeptide

[0367] Provided herein, in certain aspects, are methods for processing a proteolytically digested sample to produce a processed sample suitable for use in a liquid chromatography-mass spectrometry (LC-MS) analysis, wherein the methods comprise one or more, including any combinations thereof, techniques taught herein for subjecting the proteolytically digested sample to a solid phase extraction column comprising a reversed-phase medium or subjecting the reversed-phase medium to a wash buffer. The disclosure of the present application is based on the inventors' unique perspective and unexpected findings regarding methods for processing a proteolytically digested sample that provide an improved LC-MS analysis of glycoproteins and glycopeptides. The methods taught herein were demonstrated to significantly reduce the loss of proteolytic peptides (including proteolytic glycopeptides) during the sample clean-up processing steps, and lead to improved reproducibility, accuracy, and quantification. The methods taught herein are also amenable to automation, thus providing robust and high-throughput methods for improving the LC-MS analysis of glycoproteins and glycopeptides. Such results represent a significant advancement in the ability to use glycoproteins in the study of human physiology, such as for disease diagnosis and treatment monitoring.

[0368] Thus, in some aspects, provided herein is a method for processing a proteolytically digested sample to produce a processed sample suitable for use in a liquid chromatography-mass spectrometry (LC-MS) analysis, wherein the proteolytically digested sample comprises a plurality of proteolytic polypeptides comprising at least one proteolytic glycopeptide, the method comprising: performing one or more of the following: (a) subjecting the proteolytically digested sample to a solid phase extraction column comprising a reversed-phase medium according to one or more conditions to associate at least a portion of the plurality of proteolytic polypeptides with the reversed-phase medium, the one or more conditions comprising: (i) a polypeptide loading amount of about 50% or less of a binding capacity of the reversed-phase medium, wherein the binding capacity of the reversed-phase medium is based on an insulin load having 10% or less breakthrough; or (ii) a polypeptide loading concentration of about 0.6 μg/μL or less; or (b) subjecting the reversed-phase medium comprising the associated proteolytic polypeptides to a wash buffer at a wash flow rate of about 0.1 column volumes/minute to about 2 column volumes/minute; and subjecting the reversed-phase medium comprising the associated proteolytic polypeptides to an elution buffer to produce the processed sample.

### C2. Methods for Processing a Proteolytically Digested Sample

[0369] Provided herein, in certain aspects, are methods of processing a proteolytically digested sample using a solid phase extraction column comprising a reversed-phase material. As described in the instant application, in some embodiments, the techniques taught herein for subjecting a proteolytically digested sample to the solid phase extraction column and/or subjecting the reversed-phase medium comprising associated proteolytic polypeptides to a wash buffer provide improved LC-MS analyses of proteolytic glycopeptides. In some embodiments, the method comprises subjecting a proteolytically digested sample to a solid phase extraction column comprising a reversed-phase medium to associate at least a portion of a plurality of proteolytic polypeptides with the reversed-phase medium, wherein the polypeptide loading amount used for subjecting the reversed-phase medium to the portion of the plurality of proteolytic polypeptides is about 50% or less of a binding capacity of the reversed-phase medium, and wherein the binding capacity of the reversed-phase medium is based on an insulin load having 10% or less breakthrough. In some embodiments, the method comprises subjecting a proteolytically digested sample to a solid phase extraction column comprising a reversed-phase medium to associate at least a portion of a plurality of proteolytic polypeptides with the reversed-phase medium, wherein the polypeptide loading concentration used for subjecting the proteolytic polypeptides to the reversed-phase medium is about 0.6 μg/μL or less. In some embodiments, the method comprises subjecting a reversed-phase medium comprising the associated proteolytic polypeptides to a wash buffer at a wash flow rate of about 0.1 column volumes/minute to about 2 column volumes/minute.

[0370] In the following sections, additional description of the various aspects of the methods for processing a proteolytically digested sample is provided. Such description in a modular fashion is not intended to limit the scope of the disclosure, and based on the teachings provided herein one of ordinary skill in the art will readily appreciate that certain modules can be integrated, at least in part. The section heading used herein are for organizational purposes only and are not to be construed as limiting the subject matter described.

### I. Polypeptide Loading Amounts

[0371] In certain aspects, provided herein is a method for processing a proteolytically digested sample to produce a processed sample suitable for use in a liquid chromatography-mass spectrometry (LC-MS) analysis, wherein the method comprises subjecting the proteolytically digested sample to a solid phase extraction column comprising a reversed-phase medium according to a desired polypeptide loading amount based on the binding capacity of the reversed-phase medium. In some embodiments, the method comprises subjecting a proteolytically digested sample to a solid phase extraction column comprising a reversed-phase medium to associate at least a portion of a plurality of proteolytic polypeptides with the reversed-phase medium, wherein the polypeptide loading amount used for subjecting the reversed-phase medium to the portion of the plurality of proteolytic polypeptides is 50% or less of a binding capacity of the reversed-phase medium, and wherein the binding capacity of the reversed-phase medium is based on an insulin load having 10% or less breakthrough.

[0372] The polypeptide loading amounts encompassed herein may be described using a number of approaches, e.g., a percentage of the total binding capacity as defined by a known relevant binding capacity of a solid phase extraction column, or an absolute amount of polypeptide loaded onto a solid phase extraction column. One of ordinary skill in the art will readily understand converting between different forms of the description provided herein, and determining a binding capacity of a solid phase extraction column if not already known.

[0373] In some embodiments, the polypeptide loading amount is about 1% to about 50%, such as any of about 5% to about 50%, about 7.5% to about 50%, about 7.5% to about 25%, about 15% to about 50%, about 15% to about 25%, of a binding capacity of a reversed-phase medium of a solid phase extraction column. In some embodiments, the polypeptide loading amount is about 50% or less, such as any of 45% or less, 40% or less, 35% or less, 30% or less, 25% or less, 24% or less, 23% or less, 22% or less, 21% or less, 20% or less, 19% or less, 18% or less, 17% or less, 16% or less, 15% or less, 14% or less, 13% or less, 12% or less, 11% or less, 10% or less, 9.5% or less, 9% or less, 8.5% or less, 8% or less, or 7.5% or less, of a binding capacity of a reversed-phase medium of a solid phase extraction column. In some embodiments, the polypeptide loading amount is about 7.5%, 8%, 8.5%, 9%, 9.5%, 10%, 11%, 12%, 13%, 14%, 15%, 16%, 17%, 18%, 19%, 20%, 21%, 22%, 23%, 24%, 25%, 30%, 35%, 40%, 45%, or 50%, of a binding capacity of a reversed-phase medium of a solid phase extraction column. In any of the embodiments above, the binding capacity of the reversed-phase medium is based on an insulin load having 10% or less breakthrough. In any of the embodiments above, the binding capacity of the reversed-phase medium of the solid phase extraction column is about 400 μg.

[0374] In some embodiments, the polypeptide loading amount is about 1% to about 50%, such as any of about 5% to about 50%, about 7.5% to about 50%, about 7.5% to about 25%, about 15% to about 50%, about 15% to about 25%, of a binding capacity of a reversed-phase medium of a solid phase extraction column, wherein the binding capacity of the reversed-phase medium of the solid phase extraction column is about 400 μg. In some embodiments, the polypeptide loading amount is about 50% or less, such as any of 45% or less, 40% or less, 35% or less, 30% or less, 25% or less, 24% or less, 23% or less, 22% or less, 21% or less, 20% or less, 19% or less, 18% or less, 17% or less, 16% or less, 15% or less, 14% or less, 13% or less, 12% or less, 11% or less, 10% or less, 9.5% or less, 9% or less, 8.5% or less, 8% or less, or 7.5% or less, of a binding capacity of a reversed-phase medium of a solid phase extraction column, wherein the binding capacity of the reversed-phase medium of the solid phase extraction column is about 400 μg. In some embodiments, the polypeptide loading amount is about 7.5%, 8%, 8.5%, 9%, 9.5%, 10%, 11%, 12%, 13%, 14%, 15%, 16%, 17%, 18%, 19%, 20%, 21%, 22%, 23%, 24%, 25%, 30%, 35%, 40%, 45%, or 50%, of a binding capacity of a reversed-phase medium of a solid phase extraction column, wherein the binding capacity of the reversed-phase medium of the solid phase extraction column is about 400 μg. In any of the embodiments above, the binding capacity of the reversed-phase medium is based on an insulin load having 10% or less breakthrough.

[0375] In some embodiments, the polypeptide loading amount is about 30 μg to about 200 μg, such as any of about 30 μg to about 100 μg, about 30 μg to about 60 μg to about 200 μg, or about 60 μg to about 100 μg, wherein the binding capacity of the reversed-phase medium of the solid phase extraction column is about 400 μg. In some embodiments, the polypeptide loading amount is about 200 μg or less, such as any of 175 μg or less, 150 μg or less, 125 μg or less, 100 μg or less, 95 μg or less, 90 μg or less, 85 μg or less, 80 μg or less, 75 μg or less, 70 μg or less, 65 μg or less, 60 μg or less, 55 μg or less, 50 μg or less, 45 μg or less, 40 μg or less, 35 μg or less, or 30 μg or less, wherein the binding capacity of the reversed-phase medium of the solid phase extraction column is about 400 μg. In some embodiments, the polypeptide loading amount about any of 30 μg, 35 μg, 40 μg, 45 μg, 50 μg, 55 μg, 60 μg, 65 μg, 70 μg, 75 μg, 80 μg, 85 μg, 90 μg, 95 μg, 100 μg, 125 μg, 150 μg, 175 μg, or 200 μg, wherein the binding capacity of the reversed-phase medium of the solid phase extraction column is about 400 μg. In any of the embodiments above, the binding capacity of the reversed-phase medium is based on an insulin load having 10% or less breakthrough.

[0376] In some embodiments, the polypeptide loading amount is about 30 μg to about 200 μg, such as any of about 30 μg to about 100 μg, about 30 μg to about 60 μg to about 200 μg, or about 60 μg to about 100 μg, wherein the solid phase extraction column comprises a volume of about 5 μL of a reversed-phase medium. In some embodiments, the polypeptide loading amount is about 200 μg or less, such as any of 175 μg or less, 150 μg or less, 125 μg or less, 100 μg or less, 95 μg or less, 90 μg or less, 85 μg or less, 80 μg or less, 75 μg or less, 70 μg or less, 65 μg or less, 60 μg or less, 55 μg or less, 50 μg or less, 45 μg or less, 40 μg or less, 35 μg or less, or 30 μg or less, wherein the solid phase extraction column comprises a volume of about 5 μL of a reversed-phase medium. In some embodiments, the polypeptide loading amount about any of 30 μg, 35 μg, 40 μg, 45 μg, 50 μg, 55 μg, 60 μg, 65 μg, 70 μg, 75 μg, 80 μg, 85 μg, 90 μg, 95 μg, 100 μg, 125 μg, 150 μg, 175 μg, or 200 μg, wherein the solid phase extraction column comprises a volume of about 5 μL of a reversed-phase medium. In any of the embodiments above, the binding capacity of the reversed-phase medium of the solid phase extraction column is about 400 μg. In any of the embodiments above, the binding capacity of the reversed-phase medium is based on an insulin load having 10% or less breakthrough.

[0377] The solid phase extraction columns described herein may comprise a reversed-phase medium, or an amount thereof, encompassing a range of binding capacities for the solid phase extraction column. In some embodiments, the solid phase extraction column comprises a binding capacity of about 1 μg to about 1,000 μg, such as any of about 100 μg to about 500 μg, about 200 μg to about 500 μg, about 300 μg to about 500 μg, about 350 μg to about 500 μg, or about 350 μg to about 750 μg, such as assessed using a polypeptide or a mixture thereof, including insulin. In some embodiments, the binding capacity is based on the amount of a polypeptide (including mixtures of polypeptides) that can be associated with the reversed-phase medium of a solid phase extraction column prior to occurrence of breakthrough (loss of polypeptides in the load that occurs during a binding phase such that a portion of the polypeptide is not captured by the reversed-phase medium) 10% or more. In some embodiments, the binding capacity of the reversed-phase medium is based on a polypeptide load having 10% or less, such as any of 9% or less, 8% or less, 7% or less, 6% or less, 5% or less, 4% or less, 3% or less, 2% or less, or 1% or less, breakthrough.

[0378] Polypeptide amounts described herein may be absolute or estimated amounts. In some embodiments, the amount of polypeptide content in a sample, or a derivative thereof, is a measured directly from said sample, or the derivative thereof, e.g., using a BCA quantification assay or a UV-VIS measurement at 280 nm. In some embodiments, the amount of polypeptide content in a sample, or a derivative thereof, is estimated based on a known, including reference standard, value for polypeptide content in the sample based on the origin of the sample, e.g., such as based on a known standard polypeptide concentration in human plasma or serum.

### II. Polypeptide Loading Concentrations

[0379] In certain aspects, provided herein is a method for processing a proteolytically digested sample to produce a processed sample suitable for use in a liquid chromatography-mass spectrometry (LC-MS) analysis, wherein the method comprises subjecting the proteolytically digested sample to a solid phase extraction column comprising a reversed-phase medium according to a desired polypeptide loading concentration. In some embodiments, the method comprises subjecting a proteolytically digested sample to a solid phase extraction column comprising a reversed-phase medium to associate at least a portion of a plurality of proteolytic polypeptides with the reversed-phase medium, wherein the polypeptide loading concentration used for subjecting the proteolytic polypeptides to the reversed-phase medium is about 0.6 μg/μL or less.

[0380] In some embodiments, the polypeptide loading concentration used for subjecting polypeptides of the proteolytically digested sample to a reversed-phase medium of a solid phase extraction column is about 0.1 μg/μL to about 1 μg/μL, such as any of about 0.25 μg/μL to about 1 μg/μL, about 0.25 μg/μL to about 0.75 μg/μL, or about 0.3 μg/μL to about 0.6 μg/μL. In some embodiments, the polypeptide loading concentration used for subjecting polypeptides of the proteolytically digested sample to a reversed-phase medium of a solid phase extraction column is about 1 μg/μL or less, such as about any of 0.95 μg/μL or less, 0.9 μg/μL or less, 0.85 μg/μL or less, 0.8 μg/μL or less, 0.75 μg/μL or less, 0.7 μg/μL or less, 0.65 μg/μL or less, 0.6 μg/μL or less, 0.55 μg/μL or less, 0.5 μg/μL or less, 0.45 μg/μL or less, 0.4 μg/μL or less, 0.35 μg/μL or less, or 0.3 μg/μL or less. In some embodiments, the polypeptide loading concentration used for subjecting polypeptides of the proteolytically digested sample to a reversed-phase medium of a solid phase extraction column is about any of 1 μg/μL 0.95 μg/μL, 0.9 μg/μL, 0.85 μg/μL, 0.8 μg/μL, 0.75 μg/μL, 0.7 μg/μL, 0.65 μg/μL, 0.6 μg/μL, 0.55 μg/μL, 0.5 μg/μL, 0.45 μg/μL, 0.4 μg/μL, 0.35 μg/μL, or 0.3 μg/μL.

[0381] In some embodiments, the polypeptides of the proteolytically digested sample for subjecting to the solid phase extraction column are in a volume of about 50 μL to about 500 μL, such as any of about 50 μL to about 300 μL, about 50 μL to about 250 μL, or about 100 μL to about 200 μL. In some embodiments, the polypeptides of the proteolytically digested sample for subjecting to the solid phase extraction column are in a volume of at least about 50 μL, such as at least about any of 75 μL, 100 μL, 125 μL, 150 μL, 175 μL, 200 μL, 225 μL, 250 μL, 275 μL, 300 μL, 325 μL, 350 μL, 375 μL, 400 μL, 425 μL, 450 μL, 475 μL, or 500 μL. In some embodiments, the polypeptides of the proteolytically digested sample for subjecting to the solid phase extraction column are in a volume that is at least about 40%, such as at least about any of 45%, 50%, 55%, 60%, 65%, 70%, 75%, 80%, 85%, 90%, or 95%, of the upper range recommended for a solid phase extraction column, such as per manufacturer's instructions. In some embodiments, the volume loaded onto the solid phase extraction column comprises a loading buffer.

[0382] As discussed herein, polypeptide amounts described herein may be absolute or estimated amounts. In some embodiments, the amount of polypeptide content in a sample, or a derivative thereof, is a measured directly from said sample, or the derivative thereof, e.g., using a BCA quantification assay. In some embodiments, the amount of polypeptide content in a sample, or a derivative thereof, is estimated based on a known, including reference standard, value for polypeptide content in the sample based on the origin of the sample, e.g., such as based on a known standard polypeptide concentration in human plasma or serum.

### III. Wash Buffer Flow Rates

[0383] In certain aspects, provided herein is a method for processing a proteolytically digested sample to produce a processed sample suitable for use in a liquid chromatography-mass spectrometry (LC-MS) analysis, wherein the method comprises subjecting a reversed-phase medium comprising the associated proteolytic polypeptides to a wash buffer at a desired wash flow rate. In some embodiments, the method comprises subjecting a reversed-phase medium comprising the associated proteolytic polypeptides to a wash buffer at a wash flow rate of about 0.1 column volumes/minute to about 2 column volumes/minute.

[0384] In some embodiments, the wash flow rate of the wash buffer is about 0.1 column volumes/minute to about 2 column volumes/minute, such as any of about 0.1 column volumes/minute to about 0.5 column volumes/minute, about 0.25 column volumes/minute to about 2 column volumes/minute, about 0.25 column volumes/minute to about 1.5 column volumes/minute, or about 0.3 column volumes/minute to about 1 column volumes/minute. In some embodiments, the wash flow rate of the wash buffer is less than about 2, such as less than about any of 1.9 column volumes/minute, 1.8 column volumes/minute, 1.7 column volumes/minute, 1.6 column volumes/minute, 1.5 column volumes/minute, 1.4 column volumes/minute, 1.3 column volumes/minute, 1.2 column volumes/minute, 1.1 column volumes/minute, 1 column volume/minute, 0.9 column volumes/minute, 0.8 column volumes/minute, 0.7 column volumes/minute, 0.6 column volumes/minute, 0.5 column volumes/minute, 0.4 column volumes/minute, 0.3 column volumes/minute or 0.2 column volumes/minute. In some embodiments, the wash flow rate of the wash buffer is about any of 0.1 column volumes/minute, 0.2 column volumes/minute, 0.3 column volumes/minute, 0.4 column volumes/minute, 0.5 column volumes/minute, 0.6 column volumes/minute, 0.7 column volumes/minute, 0.8 column volumes/minute, 0.9 column volumes/minute, 1 column volume/minute, 1.1 column volumes/minute, 1.2 column volumes/minute, 1.3 column volumes/minute, 1.4 column volumes/minute, 1.5 column volumes/minute, 1.6 column volumes/minute, 1.7 column volumes/minute, 1.8 column volumes/minute, 1.9 column volumes/minute, or 2 column volumes/minute. In some embodiments, the column volume refers to the volume occupied by the reversed-phase media within the solid phase extraction column or cartridge.

[0385] In some embodiments, the wash flow rate of the wash buffer is about 1 μL/minute to about 10 μL/minute, such as about 2 μL/minute to about 8 μL/minute, about 2 μL/minute to about 5 L/minute, or about 2 μL/minute to about 4 μL/minute. In some embodiments, the wash flow rate of the wash buffer is about 10 μL/minute or less, such as any of about 9 μL/minute or less, 8 μL/minute or less, 7 μL/minute or less, 6 μL/minute or less, 5 μL/minute or less, 4 μL/minute or less, 3 μL/minute or less, 2 μL/minute or less, or 1 μL/minute or less. In some embodiments, the wash flow rate of the wash buffer is about any of 1 μL/minute, 2 μL/minute, 3 μL/minute, 4 μL/minute, 5 μL/minute, 6 μL/minute, 7 μL/minute, 8 L/minute, 9 μL/minute, or 10 μL/minute. In any of the embodiments above, the column volume is about 5 μL.

[0386] In some embodiments, the method comprises subjecting the reversed-phased medium comprising the associated proteolytic polypeptides to a wash buffer, wherein the total wash buffer applied to the reversed-phase medium is about 1 to about 50 column volumes. In some embodiments, the total wash buffer applied to the reversed-phase medium is about 50 or fewer, such as any of 45 or fewer, 40 or fewer, 35 or fewer, 30 or fewer, 25 or fewer, 20 or fewer, 15 or fewer, 10 or fewer, or 5 or fewer, column volumes.

### IV. Reversed-Phase Mediums of Solid Phase Extraction Columns

[0387] The methods provided herein, in certain aspects, involve solid phase extraction columns comprising a reversed-phase medium. Generally speaking, reversed-phase media comprise a relatively hydrophobic stationary phase configured to associate with proteolytic polypeptides, wherein relatively hydrophilic compounds, such as salts, reagents, or byproducts thereof present in a proteolytically digested sample, can be eluted from the reversed-phase medium prior to the proteolytic polypeptides using an aqueous mobile phase.

[0388] In some embodiments, the reversed-phase medium comprises an alkyl-based moiety covalently bound to a solid phase. In some embodiments, the alkyl-based moiety comprises an alkyl carbon functional group having between 1 carbon and 30 carbons, such as any of 4 carbons to 18 carbons, 8 carbons to 18 carbons, or 18 carbons to 30 carbons. In some embodiments, the alkyl-based moiety comprises an alkyl carbon functional group having 30 or fewer carbons, such as any of 25 or fewer carbons, 20 or fewer carbons, 19 or fewer carbons, 18 or fewer carbons, 17 or fewer carbons, 16 or fewer carbons, 15 or fewer carbons, 14 or fewer carbons, 13 or fewer carbons, 12 or fewer carbons, 11 or fewer carbons, 10 or fewer carbons, 9 or fewer carbons, 8 or fewer carbons, 7 or fewer carbons, 6 or fewer carbons, 5 or fewer carbons, 4 or fewer carbons. In some embodiments, the alkyl-based moiety comprises an alkyl carbon functional group comprising 4 carbons, 5 carbons, 6 carbons, 7 carbons, 8 carbons, 9 carbons, 10 carbons, 11 carbons, 12 carbons, 13 carbons, 14 carbons, 15 carbons, 16 carbons, 17 carbons, 18 carbons, 19 carbons, 20 carbons, 21 carbons, 22 carbons, 23 carbons, 24 carbons, 25 carbons, 26 carbons, 27 carbons, 28 carbons, 29 carbons, or 30 carbons. In some embodiments, the alkyl-based moiety comprises an octadecyl carbon functional group (C18) covalently bound to the solid phase. In some embodiments, the alkyl-based moiety comprises an octa carbon functional group (C8) covalently bound to the solid phase. In some embodiments, the carbon alkyl-based moiety comprises a tetra carbon functional group (C4) covalently bound to the solid phase.

[0389] In some embodiments, the reversed-phase medium comprises a silica-based material which supports an alkyl-based moiety. In some embodiments, the solid phase comprises a silica material. In some embodiments, the silica material is a silica gel, such as composed of a plurality of silica particles. In some embodiments, the silica-based material is inert. In some embodiments, the silica-based material is base-deactivated. In some embodiments, the silica-based material is an ultra-high purity silica material, such as an ultra-high purity silica gel. In some embodiments, the silica-based material comprises silanol groups that are partially or fully end-capped, such as, for example, with a C1 methyl group. In some embodiments, the silica-based material comprises silanol groups are not end-capped. The components of a silica-based material of a reversed-phase medium may take a diverse array of sizes and shapes. In some embodiments, the silica-based material comprises a plurality of particles, wherein the plurality of particles have an average largest cross-sectional distance (such as a diameter, e.g., as measured by dynamic light scattering) of about 0.5 μm to about 30 μm, such as any of about 1 μm to about 25 μm, about 15 μm to about 25 μm, about 18 μm to about 22 μm. In some embodiments, the silica-based material comprises a plurality of particles, wherein the plurality of particles have an average largest cross-sectional distance (such as a diameter, e.g., as measured by dynamic light scattering) of about any of 1 μm, 2 μm, 3 μm, 4 μm, 5 μm, 6 μm, 7 μm, 8 μm, 9 μm, 10 μm, 11 μm, 12 μm, 13 μm, 14 μm, 15 μm, 16 μm, 17 μm, 18 μm, 19 μm, 20 μm, 21 μm, 22 μm, 23 μm, 24 μm, 25 μm, 26 μm, 27 μm, 28 μm, 29 μm, or 30 μm.

[0390] In some embodiments, the silica-based material comprises a plurality of particles, wherein each particle of the plurality of particles comprises an average pore size of about 1 Å to about 500 Å, such as about 50 Å to about 300 Å, or about 100 Å to about 200 Å. In some embodiments, the silica-based material comprises a plurality of particles, wherein each particle of the plurality of particles comprises an average pore size of about any of 5 Å, 10 Å, 20 Å, 25 Å, 30 Å, 35 Å, 40 Å, 45 Å, 50 Å, 60 Å, 70 Å, 80 Å, 90 Å, 100 Å, 110 Å, 120 Å, 130 Å, 140 Å, 150 Å, 160 Å, 170 Å, 180 Å, 190 Å, 200 Å, 225 Å, 250 Å, 275 Å, 300 Å, 325 Å, 350 Å, 375 Å, 400 Å, 425 Å, 450 Å, 475 Å, or 500 Å. In some embodiments, the pore size of the silica-based medium is uniform or substantially uniform. In some embodiments, the pore size of the silica-based medium is heterogeneous. In some embodiments, the pores of the silica-based medium are derivatized with an alkyl-based moiety.

[0391] In some embodiments, the reversed-phase medium comprises a hydrophobic polymer material (e.g., RP-S). In some embodiments, the hydrophobic polymer material comprises a phenyl moiety. In some embodiments, the hydrophobic polymer material comprises a reaction product of divinylbenzene. In some embodiments, the hydrophobic polymer material comprises poly(styrene-co-divinylbenzene). In some embodiments the reversed-phase medium comprising a hydrophobic polymer material is in the form a plurality of particles. The components of a hydrophobic polymer material (e.g., RP-S) reversed-phase medium may take a diverse array of sizes and shapes. In some embodiments, the hydrophobic polymer material comprises a plurality of particles, wherein the plurality of particles have an average largest cross-sectional distance (such as a diameter, e.g., as measured by dynamic light scattering) of about 0.5 μm to about 30 μm, such as any of about 1 μm to about 25 μm, about 15 μm to about 25 μm, about 18 μm to about 22 μm. In some embodiments, the hydrophobic polymer material comprises a plurality of particles, wherein the plurality of particles have an average largest cross-sectional distance (such as a diameter, e.g., as measured by dynamic light scattering) of about any of 1 μm, 2 μm, 3 μm, 4 μm, 5 μm, 6 μm, 7 μm, 8 μm, 9 μm, 10 μm, 11 μm, 12 μm, 13 μm, 14 μm, 15 μm, 16 μm, 17 μm, 18 μm, 19 μm, 20 μm, 21 μm, 22 μm, 23 μm, 24 μm, 25 μm, 26 μm, 27 μm, 28 μm, 29 μm, or 30 μm. In some embodiments, the hydrophobic polymer material comprises a plurality of particles, wherein each particle of the plurality of particles comprises an average pore size of about 1 Å to about 500 Å, such as about 50 Å to about 300 Å, or about 100 Å to about 200 Å. In some embodiments, the hydrophobic polymer material comprises a plurality of particles, wherein each particle of the plurality of particles comprises an average pore size of about any of 5 Å, 10 Å, 20 Å, 25 Å, 30 Å, 35 Å, 40 Å, 45 Å, 50 Å, 60 Å, 70 Å, 80 Å, 90 Å, 100 Å, 110 Å, 120 Å, 130 Å, 140 Å, 150 Å, 160 Å, 170 Å, 180 Å, 190 Å, 200 Å, 225 Å, 250 Å, 275 Å, 300 Å, 325 Å, 350 Å, 375 Å, 400 Å, 425 Å, 450 Å, 475 Å, or 500 Å. In some embodiments, the pore size of the hydrophobic polymer material is uniform or substantially uniform. In some embodiments, the pore size of the hydrophobic polymer material is heterogeneous.

[0392] The reversed-phase media in the solid phase extraction columns may take a diverse array of forms. In some embodiments, the reversed-phase medium is in the form of a plurality of particles, wherein the solid phase extraction column comprises a packed column. In some embodiments, the solid phase extraction column comprises a surface modification forming the reversed-phase medium. In some embodiments, the solid phase extraction column comprises a monolithic structure. In some instances, the terms medium, media, and resin may be used interchangeably.

[0393] In some embodiments, the solid phase extraction column has a column volume of about 1 to about 10 μL, such as any of about 2 μL to about 8 μL, about 3 μL to about 7 μL, or about 4 μL to about 5 μL. In some embodiments, the solid phase extraction column has a column volume of about any of 1 μL, 2 μL, 3 μL, 4 μL, 5 μL, 6 μL, 7 μL, 8 μL, 9 μL, or 10 μL. The reversed-phase media can be referred to as a bed that is compacted within a chromatography column to form a bed volume.

[0394] In some embodiments, the reversed-phase medium comprises an alkyl-based moiety comprising an octadecyl carbon functional group (C18) covalently bound to a silica solid phase, wherein the silica solid phase comprises a plurality of particles having an average largest cross-sectional distance (such as a diameter, e.g., as measured by dynamic light scattering) of about 20 μm, and wherein the each particle of the plurality of particles comprises an average pore size of about 150 Å, and wherein the pores are derivatized with the alkyl-based moiety. In some embodiments, the solid phase extraction column comprising the reversed-phase medium has a column volume of about 5 μL. In some embodiments, the solid phase extraction column is an AssayMap 5 μL C18 cartridge (catalog no. 5190-6532; Agilent Technologies).

[0395] In some embodiments, the reversed-phase medium comprises an underivitized polystyrene divinylbenzene hydrophobic reversed-phase resin, wherein the polystyrene divinylbenzene hydrophobic reversed-phase resin comprises a plurality of particles having an average largest cross-sectional distance (such as a diameter, e.g., as measured by dynamic light scattering) of about 20 μm, and wherein each particle of the plurality of particles comprises an average pore size of about 100 Å. In some embodiments, the solid phase extraction column comprising the reversed-phase medium has a column volume of about 5 μL. In some embodiments, the solid phase extraction column is an AssayMAP 5 μL Reversed Phase (RP-S) cartridge (catalog no. G5496-60033; Agilent Technologies).

### V. Additional Aspects of the Methods for Processing

[0396] The steps involved with the taught methods include the steps of loading a proteolytically digest sample onto a solid phase extraction column and washing proteolytic polypeptides associated with the reversed-phase medium of the solid phase extraction column. In some embodiments, these steps comprise the use of solutions to facilitate the performance of said step. In some embodiments, the proteolytically digested sample for loading onto a solid phase extraction column has a pH of less than 3, such as for use with a C18 or RP-S solid phase extraction column. In some embodiments, the proteolytically digested sample for loading onto a solid phase extraction column has a pH of greater than 10, such as for use with a RP-S solid phase extraction column. In some embodiments, the proteolytically digested sample comprises a loading solution, such as water with an acid, such as TFA, wherein the final concentration of TFA in the proteolytically digested sample is 1% or less. In some embodiments, the loading solution comprises 0.1% TFA in water. In some embodiments, the wash buffer is an aqueous solution (such as water) with 1% or less of an acid, such as 0.1% TFA in water. In some embodiments, the components of the loading solutions and wash buffers are HPLC-grade.

[0397] In certain aspects, the methods for processing a proteolytically digested sample to produce a processed sample suitable for use in a LC-MS analysis provided herein comprise further steps for the production of the processed sample.

[0398] In some embodiments, the method comprises any one or more of: (a) a solid phase extraction column priming step; (b) a solid phase extraction column equilibration step; (c) a sample loading step; (d) a wash step; or (e) an elution step. In some embodiments, the priming step comprises passing an amount (such as 1 column volume to about 20 column volumes) of a solution comprising at least 25% organic (such as 50% ACN with 0.1% TFA) through the solid phase extraction column. In some embodiments, the equilibration step comprises passing an amount (such as 1 column volume to about 50 column volumes) of 0.1% TFA in water through the solid phase extraction column. In some embodiments, the elution step comprises passing an amount (such as 1 column volume to about 50 column volumes) of a solution comprising at least about 50% organic (such as 50% ACN with 0.1% TFA) through the solid phase extraction column. In some embodiments, the method comprises one or more steps according to a manufacturer's instructions, such as for AssayMap 5 μL C18 cartridge (catalog no. 5190-6532; Agilent Technologies) or AssayMAP 5 μL Reversed Phase (RP-S) cartridge (catalog no. G5496-60033; Agilent Technologies).

[0399] In some embodiments, the method provided herein produces a processed sample suitable for use in a LC-MS technique. In some embodiments, the processed sample has a yield of at least about 70%, such as at least about any of 75%, 80%, 85%, 90%, or 95%, relative to the total polypeptide content of the proteolytically digested sample. In some embodiments, the processed sample has a glycopeptide yield (such as assessed from one or more, including all, glycopeptides in a proteolytically digested sample) of at least about 70%, such as at least about any of 75%, 80%, 85%, 90%, or 95%, relative to the total glycopolypeptide content of the proteolytically digested sample.

[0400] In some embodiments, wherein the method for processing a proteolytically digested sample is performed in replicate (e.g., two or more aliquots of a proteolytically digested sample are processed using the same method for processing), the resulting coefficient of variation (CV) of a peak feature, such as peak area of the measured polypeptide, e.g., glycopolypeptide, is about 15% or less, such as about any of 14% or less, 13% or less, 12% or less, 11% or less, 10% or less, 9% or less, 8% or less, 7% or less, 6% or less, 5% or less, 4% or less, 3% or less, 2% or less, or 1% or less.

[0401] In some embodiments, the proteolytically digested sample and the processed sample produced therefrom using the methods described herein comprises at least one glycopeptide. In some embodiments, the glycopeptide comprises one or more, including 1, 2, 3, 4, or 5, sialic acid moieties.

[0402] In some embodiments, the method comprises generating a unity plot to compare different processing methods. Unity plots are known in the art. In a unity plot, a null effect between the two plotted conditions (e.g., processing methods) is indicated when plotted points run along the unity line. When the data points of a unity plot are skewed above or below the unity line, then biasing can be identified to indicate a preferred condition. For example, biasing above the unity line indicates improved results with the y-axis condition, and biasing below the unity line indicates improved results with the x-axis condition.

### D2. Methods for Proteolytically Digesting a Biological Sample Comprising a Glycoprotein

[0403] In certain aspects, provided herein are methods of proteolytically digesting a biological sample comprising a glycoprotein, the methods comprising subjecting the biological sample to a thermal denaturation technique. Proteases are enzymes that cleave polypeptides at, generally, specific cleavage motifs. For example, trypsin is a serine protease that generally cleaves polypeptides at the carboxyl side (C-terminal side) of lysine and arginine residues. A glycan of a glycopeptide may present a steric hindrance to a protease, thereby inhibiting complete protease digestion of a biological sample comprising a glycoprotein. Without being bound to this theory, it is believed that the methods taught herein improve polypeptide unfolding, such as linearization, and provide protease access to cleavage sites thereby providing methods for more complete proteolytic digestion of glycoproteins.

[0404] In some aspects, provided is a method comprising subjecting a biological sample to a thermal denaturation technique to produce a denatured sample.

[0405] In other aspects, provided is a method comprising subjecting a biological sample to a thermal denaturation technique to produce a denatured sample followed by a proteolytic digestion technique to produce a proteolytically digested sample comprising a proteolytic glycopeptide. In some embodiments, the method comprises quenching one or more proteases used in a proteolytic digestion technique prior to a downstream technique, such as LC-MS.

[0406] In other aspects, provided herein is a method comprising: subjecting a biological sample to a thermal denaturation technique to produce a denatured sample; subjecting the denatured sample to a reduction technique to produce a reduced sample; subjecting the reduced sample to an alkylation technique to produce an alkylated sample; and subjecting the alkylated sample to a proteolytic digestion technique to produce a proteolytically digested sample comprising the proteolytic glycopeptide. In some embodiments, the method comprises quenching an alkylating agent used in the alkylation technique prior to subjecting an alkylated sample to a proteolytic digestion technique. In some embodiments, the method comprises quenching one or more proteases used in a proteolytic digestion technique prior to a downstream technique, such as LC-MS.

[0407] In some embodiments, the proteolytic digestion methods described herein produce a proteolytic digestion sample, including one comprising a proteolytic glycopeptide, having a digestion completion rate of at least about 70%, such as at least about any of 75%, 80%, 85%, 90%, 91%, 92%, 93%, 94%, 95%, 96%, 97%, 98%, or 99%. In some embodiments, the proteolytic digestion methods described herein produce a proteolytic digestion sample, including one comprising a proteolytic glycopeptide, wherein the sample volume loss is 10% or less, such as 9% or less, 8% or less, 7% or less, 6% or less, 5% or less, 4% or less, 3% or less, 2% or less, or 1% or less, based on all volumes added in producing the proteolytic digestion sample.

[0408] In the following sections, additional description of the various aspects of the proteolytic digestion techniques is provided. Such description in a modular fashion is not intended to limit the scope of the disclosure, and based on the teachings provided herein one of ordinary skill in the art will readily appreciate that certain modules can be integrated, at least in part. The section heading used herein are for organizational purposes only and are not to be construed as limiting the subject matter described.

### I. Thermal Denaturation Techniques

[0409] In certain aspects, the methods provided herein comprise performing a thermal denaturation technique. Thermal denaturation techniques, generally speaking, change certain polypeptides conformational structures, such as by unfolding and/or linearizing a polypeptide, to enable protease access to cleavage sites. Thermal denaturation techniques described herein comprise subjecting a sample, or a derivative thereof (e.g., a sample diluted with a buffer), to a thermal treatment of about 60° C. to about 100° C. for thermal denaturation incubation time of at least about 1 minute. In some embodiments, the thermal denaturation technique is not performed concurrently with a chemical denaturation technique, such as using high concentrations of denaturing agent, e.g., 6M urea. In some embodiments, the method does not include use of a chemical denaturation technique.

[0410] In some embodiments, the thermal denaturation incubation time is performed at a temperature of about 60° C. to about 100° C., such as any of about 70° C. to about 100° C., about 80° C. to about 100° C., about 90° C. to about 100° C., about 95° C. to about 100° C., or about 85° C. to about 95° C. In some embodiments, the thermal denaturation incubation time is performed at a temperature of at least about 60° C., such as at least about any of 65° C., 70° C., 75° C., 80° C., 85° C., 90° C., 95° C., or 100° C. In some embodiments, the thermal denaturation incubation time is performed at a temperature of about 100° C. or less, such as about any of 95° C. or less, 90° C. or less, 85° C. or less, 80° C. or less, 75° C. or less, 70° C. or less, 65° C. or less, 60° C. or less. In some embodiments, the thermal denaturation incubation time is performed at a temperature of about any of 60° C., 65° C., 70° C., 75° C., 80° C., 85° C., 90° C., 91° C., 92° C., 93° C., 94° C., 95° C., 96° C., 97° C., 98° C., 99° C., or 100° C.

[0411] In some embodiments, the thermal denaturation incubation time is about 1 minute to about 15 minutes, such as any of about 1 minute to about 5 minutes, about 1 minute to about 10 minutes, about 2.5 minutes to about 7.5 minutes, or about 5 minutes to about 15 minutes. In some embodiments, the thermal denaturation incubation time is at least about 1 minute, such as at least about any of 1.5 minutes, 2 minutes, 2.5 minutes, 3 minutes, 3.5 minutes, 4 minutes, 4.5 minutes, 5 minutes, 5.5 minutes, 6 minutes, 6.5 minutes, 7 minutes, 7.5 minutes, 8 minutes, 8.5 minutes, 9 minutes, 9.5 minutes, 10 minutes, 11 minutes, 12 minutes, 13 minutes, 14 minutes, or 15 minutes. In some embodiments, the thermal denaturation incubation time is about 15 minutes or less, such as about any of 14 minutes or less, 13 minutes or less, 12 minutes or less, 11 minutes or less, 10 minutes or less, 9.5 minutes or less, 9 minutes or less, 8.5 minutes or less, 8 minutes or less, 7.5 minutes or less, 7 minutes or less, 6.5 minutes or less, 6 minutes or less, 5.5 minutes or less, 5 minutes or less, 4.5 minutes or less, 4 minutes or less, 3.5 minutes or less, 3 minutes or less, 2.5 minutes or less, 2 minutes or less, 1.5 minutes or less, or 1 minute or less. In some embodiments, the thermal denaturation incubation time is about any of 1 minute, 1.5 minutes, 2 minutes, 2.5 minutes, 3 minutes, 3.5 minutes, 4 minutes, 4.5 minutes, 5 minutes, 5.5 minutes, 6 minutes, 6.5 minutes, 7 minutes, 7.5 minutes, 8 minutes, 8.5 minutes, 9 minutes, 9.5 minutes, 10 minutes, 11 minutes, 12 minutes, 13 minutes, 14 minutes, or 15 minutes.

[0412] In some embodiments, the thermal denaturation technique comprises a thermal denaturation incubation time of about 1 minute to about 15 minutes, such as about any of 1 minute, 2 minutes, 3 minutes, 4 minutes, 5 minutes, 6 minutes, 7 minutes, 8 minutes, 9 minutes 10 minutes, 11 minutes, 12 minutes, 13 minutes, 14 minutes, or 15 minutes, wherein the thermal denaturation incubation is performed at a temperature of about 60° C. to about 100° C., such about any of 60° C., 65° C., 70° C., 75° C., 80° C., 85° C., 90° C., 91° C., 92° C., 93° C., 94° C., 95° C., 96° C., 97° C., 98° C., 99° C., or 100° C.

[0413] The thermal denaturation incubation temperature can be controlled by numerous techniques and combinations thereof. In some embodiments, the thermal denaturation incubation temperature is controlled by a water bath. In some embodiments, the thermal denaturation incubation temperature is controlled by a heat block. In some embodiments, the thermal denaturation incubation temperature is controlled by a thermocycler, e.g., a thermocycler with a lid temperature control element. As described herein, in some embodiments, control of sample temperature when performed using a thermocycler is via a temperature block element. In some embodiments, temperature changes prior to and/or after the thermal denaturation incubation time temperature are controlled by a technique described herein, such as cooling at room temperature or via the thermocycler.

[0414] In some embodiments, the thermal denaturation technique comprises subjecting a sample, or a derivative thereof, e.g., a sample diluted in a buffer, to a thermal cycle. In some embodiments, the thermal cycle comprises subjecting the sample, or a derivative thereof, to one or more of: (a) a block starting temperature (b) block set temperature (the temperature for the thermal denaturation incubation time); (c) a block ending temperature; (d) one or more ramp rates between temperature changes in the thermal cycle (such as between the block starting temperature and the block set temperature or between the block set temperature and the block ending temperature); and (e) a lid temperature relative to the block temperature. In some embodiments, the thermal cycle is performed, in whole or in part, using a thermocycler. In some embodiments, the thermal cycle is configured to reduce and/or prevent loss of sample, such as by escaping vapor and/or condensation when the sample container is opened. In some embodiments, the thermal cycle comprises a set block temperature of about 60° C. to about 100° C., including about any of 60° C., 65° C., 70° C., 75° C., 80° C., 85° C., 90° C., 91° C., 92° C., 93° C., 94° C., 95° C., 96° C., 97° C., 98° C., 99° C., or 100° C. In some embodiments, the thermal cycle comprises: (a) a set block temperature of about 60° C. to about 100° C., including about any of 60° C., 65° C., 70° C., 75° C., 80° C., 85° C., 90° C., 91° C., 92° C., 93° C., 94° C., 95° C., 96° C., 97° C., 98° C., 99° C., or 100° C., and (b) a block ending temperature of about 15° C. to about 35° C., such as any of about 20° C. to about 35° C., or about 20° C. to about 25° C. In some embodiments, the thermal cycle comprises: (a) starting block temperature of about 15° C. to about 50° C., such as any of 15° C. to about 25° C., about 20° C. to about 30° C., or about 20° C. to about 25° C., including about any of 20° C., 21° C., 22° C., 23° C., 24° C., 25° C., (b) a set block temperature of about 60° C. to about 100° C., such about any of 60° C., 65° C., 70° C., 75° C., 80° C., 85° C., 90° C., 91° C., 92° C., 93° C., 94° C., 95° C., 96° C., 97° C., 98° C., 99° C., or 100° C., and (c) a block ending temperature of about 15° C. to about 35° C., such as any of about 20° C. to about 35° C., or about 20° C. to about 25° C. In any of the thermal cycles described herein, in some embodiments, the lid temperature during the thermal cycle is configured to reduce and/or inhibit condensate formation near or on the lid of a sample container. In some embodiments, the lid temperature during the thermal cycle is at least about 2° C., such as at least about any of 2.5° C., 3° C., 3.5° C., 4° C., 4.5° C., 5° C., 5.5° C., 6° C., 6.5° C., 7° C., 7.5° C., 8° C., 8.5° C., 9° C., 9.5° C., 10° C., 11° C., 12° C., 13° C., 14° C., 15° C., 16° C., 17° C., 18° C., 19° C., or 20° C., higher than the respective temperature of the block during the thermal cycle. In some embodiments, the lid temperature during at least a portion of a thermal cycle is about 102° C. to about 120° C., such as about any of 103° C., 104° C., 105° C., 106° C., 107° C., 108° C., 109° C., or 110° C. In some embodiments, the lid temperature during the thermal cycle may be the same respective temperature of the block during the thermal cycle or a temperature greater than the temperature of the block during the thermal cycle. In some embodiments, the lid temperature during the thermal cycle may be the same respective temperature of the block during the thermal cycle or a temperature greater than the temperature of the block during the thermal cycle.

[0415] In some embodiments, the ramp rate between a temperature change in a thermal cycle (such as between a block starting temperature and a block set temperature and/or between a block set temperature a the block ending temperature) is about 1° C./second to about 10° C./second, such as any of 1° C./second, 1.5° C./second, 2° C./second, 2.5° C./second, 3° C./second, 3.5° C./second, 4° C./second, 4.5° C./second, 5° C./second, 5.5° C./second, 6° C./second, 6.5° C./second, 7° C./second, 7.5° C./second, 8° C./second, 8.5° C./second, 9° C./second, 9.5° C./second, or 10° C./second.

[0416] In some embodiments, the method further comprises admixing an amount of a biological sample a buffer prior to the thermal denaturation technique (e.g., the buffered sample is subjected to a thermal denaturation technique described herein). In some embodiment, the amount (as assessed based on the final concentration in the sample containing solution containing solution) of the buffer is about 1 mM to about 100 mM, such as any of about 20 mM to about 80 mM, about 30 mM to about 70 mM, or about 40 mM to about 60 mM. In some embodiment, the amount of the buffer is about any of 10 mM, 15 mM, 20 mM, 25 mM, 30 mM, 35 mM, 40 mM, 45 mM, 50 mM, 55 mM, 60 mM, 65 mM, 70 mM, 75 mM, 80 mM, 85 mM, 90 mM, 95 mM, or 100 mM. In some embodiments, the buffer is selected from the group consisting of ammonium bicarbonate, ammonium acetate, ammonium formate, triethylammonium bicarbonate, and Tris-HCl, or any combination thereof.

[0417] In some embodiments, the method further comprises determining the protein concentration in a biological sample or a derivative thereof.

### II. Reduction Techniques

[0418] In certain aspects, the methods provided herein comprise performing a reduction technique. In some embodiments, the reduction technique is performed on a sample, or a derivative thereof, following thermal denaturation. Reduction techniques, generally speaking, reduce (e.g., cleave) disulfide linkages between cysteine residues of one or more polypeptides to reduce the presence of polypeptide conformations that inhibit or prevent protease cleavage of the one or more polypeptides. Reduction techniques described herein comprise subjecting a sample, or a derivative thereof (e.g., a denatured sample), to an amount of a reducing agent and incubating for a reducing incubation time performed at a temperature or range thereof.

[0419] In some embodiments, the reducing agent is dithiothreitol (DTT), tris(2-carboxyethyl) phosphine (TCEP), beta-mercaptoethanol (BME), or a cysteine, or any mixture thereof.

[0420] In some embodiments, the amount (as assessed based on the final concentration in the sample containing solution containing solution) of a reducing agent, e.g., DTT, used in a reduction technique is about 1 mM to about 100 mM, such as any of about 1 mM to about 40 mM, about 1 mM to about 30 mM, about 5 mM to about 25 mM, about 10 mM, to about 20 mM, 20 mM to about 80 mM, about 30 mM to about 70 mM, or about 40 mM to about 60 mM. In some embodiments, the amount of reducing agent used in a reduction technique is at least about 1 mM, such as at least about any of 2 mM, 3 mM, 4 mM, 5 mM, 6 mM, 7 mM, 8 mM, 9 mM, 10 mM, 11 mM, 12 mM, 13 mM, 14 mM, 15 mM, 16 mM, 17 mM, 18 mM, 19 mM, 20 mM, 25 mM, 30 mM, 35 mM, 40 mM, 45 mM, 50 mM, 55 mM, 60 mM, 65 mM, 70 mM, 75 mM, 80 mM, 85 mM, 90 mM, 95 mM, or 100 mM. In some embodiments, the amount of reducing agent used in a reduction technique is about 100 mM or less, such as about any of 95 mM or less, 90 mM or less, 85 mM or less, 80 mM or less, 75 mM or less, 70 mM or less, 65 mM or less, 60 mM or less, 55 mM or less, 50 mM or less, 45 mM or less, 40 mM or less, 35 mM or less, 30 mM or less, 25 mM or less, 20 mM or less, 19 or less, 18 or less, 17 or less, 16 or less, 15 or less, 14 or less, 13 or less, 12 or less, 11 or less, 10 or less, 9 or less, 8 or less, 7 or less, 6 or less, 5 or less, 4 or less, 3 or less, 2 or less, or 1 or less. In some embodiments, the amount of reducing agent used in a reduction technique is about any of 1 mM, 2 mM, 3 mM, 4 mM, 5 mM, 6 mM, 7 mM, 8 mM, 9 mM, 10 mM, 11 mM, 12 mM, 13 mM, 14 mM, 15 mM, 16 mM, 17 mM, 18 mM, 19 mM, 20 mM, 25 mM, 30 mM, 35 mM, 40 mM, 45 mM, 50 mM, 55 mM, 60 mM, 65 mM, 70 mM, 75 mM, 80 mM, 85 mM, 90 mM, 95 mM, or 100 mM.

[0421] In some embodiments, the reduction incubation time is about 10 minutes to about 120 minutes, such as any of about 30 minutes to about 60 minutes, about 40 minutes to about 60 minutes, about 45 minutes to about 55 minutes. In some embodiments, the reduction incubation time is at least about 20 minutes, such as at least about any of 25 minutes, 30 minutes, 35 minutes, 40 minutes, 45 minutes, 50 minutes, 55 minutes, 60 minutes, 65 minutes, 70 minutes, 75 minutes, 80 minutes, 85 minutes, 90 minutes, 95 minutes, 100 minutes, 105 minutes, 110 minutes, 115 minutes. In some embodiments, the reduction incubation time is about 120 minutes or less, such as about any of 115 minutes or less, 110 minutes or less, 105 minutes or less, 100 minutes or less, 95 minutes or less, 90 minutes or less, 85 minutes or less, 80 minutes or less, 75 minutes or less, 70 minutes or less, 65 minutes or less, 60 minutes or less, 55 minutes or less, 50 minutes or less, 45 minutes or less, 40 minutes or less, 35 minutes or less, 30 minutes or less, or 25 minutes or less. In some embodiments, the reduction incubation time is about any of 20 minutes, 25 minutes, 30 minutes, 35 minutes, 40 minutes, 45 minutes, 50 minutes, 55 minutes, 60 minutes, 65 minutes, 70 minutes, 75 minutes, 80 minutes, 85 minutes, 90 minutes, 95 minutes, 100 minutes, 105 minutes, 110 minutes, 115 minutes.

[0422] In some embodiments, the reduction incubation time is performed at a temperature of about 20° C. to about 100° C., such as any of about 40° C. to about 80° C., about 50° C. to about 70° C., about 50° C. to about 60° C., about 55° C. to about 65° C., or about 60° C. to about 70° C. In some embodiments, the reduction incubation time is performed at a temperature of at least about 20° C., such as at least about any of 25° C., 30° C., 35° C., 40° C., 45° C., 50° C., 55° C., 60° C., 65° C., 70° C., 75° C., 80° C., 85° C., 90° C., or 95° C. In some embodiments, the reduction incubation time is performed at a temperature of about 95° C. or less, such as about any of 90° C. or less, 85° C. or less, 80° C. or less, 75° C. or less, 70° C. or less, 65° C. or less, 60° C. or less, 55° C. or less, 50° C. or less, 45° C. or less, 40° C. or less, 35° C. or less, 30° C. or less, or 25° C. or less. In some embodiments, the reduction incubation time is performed at a temperature of about any of 20° C., 25° C., 30° C., 35° C., 40° C., 45° C., 50° C., 51° C., 52° C., 53° C., 54° C., 55° C., 56° C., 57° C., 58° C., 59° C., 60° C., 61° C., 62° C., 63° C., 64° C., 65° C., 66° C., 67° C., 68° C., 69° C., 70° C., 75° C., 80° C., 85° C., 90° C., or 95° C. In some embodiments, the reduction incubation time is performed at a room temperature.

[0423] In some embodiments, the reduction technique comprises a reduction incubation time of about 30 minutes to about 70 minutes, such as about any of 35 minutes, 40 minutes, 45 minutes, 50 minutes, 55 minutes, 60 minutes, or 65 minutes, wherein the reduction incubation time is performed at a temperature of about 50° C. to about 70° C., such about any of 55° C., 60° C., or 65° C. In some embodiments, the reduction technique comprises use of an amount (as assessed based on the final concentration in the sample containing solution) of a reducing agent, e.g., DTT, of about 5 mM to about 25 mM, such as any of about 6 mM, 7 mM, 8 mM, 9 mM, 10 mM, 11 mM, 12 mM, 13 mM, 14 mM, 15 mM, 16 mM, 17 mM, 18 mM, 19 mM, 20 mM, 21 mM, 22 mM, 23 mM, or 24 mM, and a reduction incubation time of about 30 minutes to about 70 minutes, such as about any of 35 minutes, 40 minutes, 45 minutes, 50 minutes, 55 minutes, 60 minutes, or 65 minutes, wherein the reduction incubation time is performed at a temperature of about 50° C. to about 70° C., such about any of 55° C., 60° C., or 65° C.

[0424] The reduction incubation temperature can be controlled by numerous techniques and combinations thereof. In some embodiments, the reduction incubation temperature is controlled by an ambient temperature, such as room temperature. In some embodiments, the reduction incubation temperature is controlled by a water bath. In some embodiments, the reduction incubation temperature is controlled by a heat block. In some embodiments, the reduction incubation temperature is controlled by a thermocycler, e.g., a thermocycler with a lid temperature control element. As described herein, in some embodiments, control of sample temperature when performed using a thermocycler is via a temperature block element. In some embodiments, temperature changes prior to and/or after the reduction incubation time temperature are controlled by a technique described herein, such as cooling at room temperature or a ramp rate.

[0425] In some embodiments, the reduction technique comprises subjecting a sample, or a derivative thereof, e.g., a denatured sample, to a thermal cycle. In some embodiments, the thermal cycle comprises subjecting the sample, or a derivative thereof, to one or more of: (a) a block starting temperature (b) block set temperature (the temperature for the reduction incubation time); (c) a block ending temperature; (d) one or more ramp rates between temperature changes in the thermal cycle (such as between the block starting temperature and the block set temperature or between the block set temperature and the block ending temperature); and (e) a lid temperature relative to the block temperature. In some embodiments, the thermal cycle is performed, in whole or in part, using a thermocycler. In some embodiments, the thermal cycle is configured to reduce and/or prevent loss of sample, such as by escaping vapor and/or condensation when the sample container is opened. In some embodiments, the thermal cycle comprises a set block temperature of about 20° C. to about 100° C., such as any of 40° C. to about 80° C., about 50° C. to about 70° C., about 50° C. to about 60° C., about 55° C. to about 65° C., or about 60° C. to about 70° C., including about any of 50° C., 55° C., 60° C., 65° C., or 70° C. In some embodiments, the thermal cycle comprises: (a) a set block temperature of about 20° C. to about 100° C., such as any of about 40° C. to about 80° C., about 50° C. to about 70° C., about 50° C. to about 60° C., about 55° C. to about 65° C., or about 60° C. to about 70° C., including about any of 50° C., 55° C., 60° C., 65° C., or 70° C., and (b) a block ending temperature of about 15° C. to about 35° C., such as any of about 20° C. to about 35° C., or about 20° C. to about 25° C. In some embodiments, the thermal cycle comprises: (a) starting block temperature of about 15° C. to about 60° C., such as any of about 15° C. to about 50° C., about 20° C. to about 40° C., about 20° C. to about 30° C., or about 20° C. to about 25° C., (b) a set block temperature of about 20° C. to about 100° C., such as any of about 40° C. to about 80° C., about 50° C. to about 70° C., about 50° C. to about 60° C., about 55° C. to about 65° C., or about 60° C. to about 70° C., including about any of 50° C., 55° C., 60° C., 65° C., or 70° C., and (c) a block ending temperature of about 15° C. to about 35° C., such as any of about 20° C. to about 35° C., or about 20° C. to about 25° C. In any of the thermal cycles described herein, in some embodiments, the lid temperature during the thermal cycle is configured to reduce and/or inhibit condensate formation near or on the lid of a sample container. In some embodiments, the lid temperature during the thermal cycle is at least about 2° C., such as at least about any of 2.5° C., 3° C., 3.5° C., 4° C., 4.5° C., 5° C., 5.5° C., 6° C., 6.5° C., 7° C., 7.5° C., 8° C., 8.5° C., 9° C., 9.5° C., 10° C., 11° C., 12° C., 13° C., 14° C., 15° C., 16° C., 17° C., 18° C., 19° C., or 20° C., higher than the respective temperature of the block during the thermal cycle. In some embodiments, the lid temperature during at least a portion of a thermal cycle is about 102° C. to about 120° C., such as about any of 103° C., 104° C., 105° C., 106° C., 107° C., 108° C., 109° C., or 110° C.

[0426] In some embodiments, the ramp rate between a temperature change in a thermal cycle (such as between a block starting temperature and a block set temperature and/or between a block set temperature a the block ending temperature) is about 1° C./second to about 10° C./second, such as any of 1° C./second, 1.5° C./second, 2° C./second, 2.5° C./second, 3° C./second, 3.5° C./second, 4° C./second, 4.5° C./second, 5° C./second, 5.5° C./second, 6° C./second, 6.5° C./second, 7° C./second, 7.5° C./second, 8° C./second, 8.5° C./second, 9° C./second, 9.5° C./second, or 10° C./second.

[0427] In some embodiments, the reduction technique described herein is completed simultaneously with a thermal denaturation step. For example, the combined thermal denaturation technique and reduction technique comprises adding a reducing agent to a sample, or a derivative thereof, and then subjecting the sample, or the derivative thereof, to a temperature of about 60° C. to about 100° C., such about any of 60° C., 65° C., 70° C., 75° C., 80° C., 85° C., 90° C., 91° C., 92° C., 93° C., 94° C., 95° C., 96° C., 97° C., 98° C., 99° C., or 100° C., for an incubation time of at least about 1 minute, such as at least about any of 2 minutes, 3 minutes, 4 minutes, 5 minutes, 10 minutes, 15 minutes, 20 minutes, 25 minutes, 30 minutes, 35 minutes, 40 minutes, 45 minutes, 50 minutes, 55 minutes, or 60 minutes. In some embodiments, the combined thermal denaturation technique and reduction technique comprises adding a reducing agent to a sample, or a derivative thereof, and then subjecting the sample, or the derivative thereof, to a temperature of about 90° C. to about 100° C., for an incubation time of about 40 minutes to about 60 minutes, including 50 minutes.

### III. Alkylation Techniques

[0428] In certain aspects, the methods provided herein comprise performing an alkylation technique. In some embodiments, the alkylation technique is performed on a sample, or a derivative thereof, following the performance of a reduction technique. Alkylation techniques, generally speaking, prevent the reformation of one or more disulfide linkages between, e.g., cysteine residues of one or more polypeptides. This is done by, e.g., the addition of an acetamide moiety to the sulfur of a cysteine residue thereby producing an alkylated polypeptide. Alkylation techniques may reduce the presence of polypeptide conformations that inhibit or prevent protease cleavage of the one or more polypeptides. Alkylation techniques described herein comprise subjecting a sample, or a derivative thereof (e.g., a reduced sample), to an amount of an alkylating agent and incubating for an alkylation incubation time performed at a temperature or range thereof. In some embodiments, the method comprises subjecting a denatured sample to a reduction technique followed by an alkylation technique prior to performing a proteolytic digestion technique.

[0429] In some embodiments, the alkylating agent is iodoacetamide (IAA), 2-chloroacetamide, an acetamide salt, or any mixture thereof.

[0430] In some embodiments, the amount (as assessed based on the final concentration in the sample containing solution) of an alkylating agent, e.g., IAA, used in an alkylation technique is about 10 mM to about 100 mM, such as any of about 10 mM to about 50 mM, about 20 mM to about 40 mM, about 20 mM to about 36 mM, about 15 mM to about 25 mM, about 20 mM to about 25 mM, about 20 mM to about 80 mM, about 30 mM to about 70 mM, or about 40 mM to about 60 mM. In some embodiments, the amount of an alkylating agent used in an alkylation technique is at least about 10 mM, such as at least about any of 15 mM, 16 mM, 17 mM, 18 mM, 19 mM, 20 mM, 21 mM, 22 mM, 23 mM, 24 mM, 25 mM, 30 mM, 35 mM, 40 mM, 45 mM, 50 mM, 55 mM, 60 mM, 65 mM, 70 mM, 75 mM, 80 mM, 85 mM, 90 mM, 95 mM, or 100 mM. In some embodiments, the amount of an alkylating agent used in an alkylation technique is about 100 mM or less, such as about any of 95 mM or less, 90 mM or less, 85 mM or less, 80 mM or less, 75 mM or less, 70 mM or less, 65 mM or less, 60 mM or less, 55 mM or less, 50 mM or less, 45 mM or less, 40 mM or less, 35 mM or less, 30 mM or less, 25 mM or less, 24 mM or less, 23 mM or less, 22 mM or less, 21 mM or less, 20 mM or less, 19 mM or less, 18 mM or less, 17 mM or less, 16 mM or less, 15 mM or less, or 10 mM or less. In some embodiments, the amount of an alkylating agent used in an alkylation technique is about any of 10 mM, 15 mM, 20 mM, 20.5 mM, 21 mM, 21.5 mM, 22 mM, 22.5 mM, 23 mM, 23.5 mM, 24 mM, 24.5 mM, 25 mM, 30 mM, 35 mM, 40 mM, 45 mM, 50 mM, 55 mM, 60 mM, 65 mM, 70 mM, 75 mM, 80 mM, 85 mM, 90 mM, 95 mM, or 100 mM.

[0431] In some embodiments, the alkylation incubation time is about 5 minutes to about 60 minutes, such as any of about 10 minutes to about 50 minutes, about 20 minutes to about 40 minutes, about 25 minutes to about 35 minutes. In some embodiments, the alkylation incubation time is at least about 5 minutes, such as at least about any of 10 minutes, 15 minutes, 20 minutes, 25 minutes, 30 minutes, 35 minutes, 40 minutes, 45 minutes, 50 minutes, 55 minutes, or 60 minutes. In some embodiments, the alkylation incubation time is about 60 minutes or less, such as about any of 55 minutes or less, 50 minutes or less, 45 minutes or less, 40 minutes or less, 35 minutes or less, 30 minutes or less, 25 minutes or less, 20 minutes or less, 15 minutes or less, 10 minutes or less, or 5 minutes or less. In some embodiments, the alkylation incubation time is about any of 5 minutes, 10 minutes, 15 minutes, 20 minutes, 25 minutes, 30 minutes, 35 minutes, 40 minutes, 45 minutes, 50 minutes, 55 minutes, or 60 minutes.

[0432] In some embodiments, the alkylation incubation time is performed at a temperature of about 15° C. to about 100° C., such as any of about 15° C. to about 80° C., about 15° C. to about 60° C., about 15° C. to about 35° C., about 20° C. to about 30° C., or about 20° C. to about 25° C. In some embodiments, the alkylation incubation time is performed at a temperature of at least about 15° C., such as at least about any of 20° C., 21° C., 22° C., 23° C., 24° C., 25° C., 30° C., 35° C., 40° C., 45° C., 50° C., 55° C., 60° C., 65° C., 70° C., 75° C., 80° C., 85° C., 90° C., or 95° C. In some embodiments, the alkylation incubation time is performed at a temperature of about 95° C. or less, such as about any of 90° C. or less, 85° C. or less, 80° C. or less, 75° C. or less, 70° C. or less, 65° C. or less, 60° C. or less, 55° C. or less, 50° C. or less, 45° C. or less, 40° C. or less, 35° C. or less, 30° C. or less, 25° C. or less, 24° C. or less, 23° C. or less, 22° C. or less, 21° C. or less, or 20° C. or less. In some embodiments, the alkylation incubation time is performed at a temperature of about any of 15° C., 16° C., 17° C., 18° C., 19° C., 20° C., 21° C., 22° C., 23° C., 24° C., 25° C., 30° C., 35° C., 40° C., 45° C., 50° C., 51° C., 52° C., 53° C., 54° C., 55° C., 56° C., 57° C., 58° C., 59° C., 60° C., 61° C., 62° C., 63° C., 64° C., 65° C., 66° C., 67° C., 68° C., 69° C., 70° C., 75° C., 80° C., 85° C., 90° C., or 95° C. In some embodiments, the alkylation incubation time is performed at a room temperature.

[0433] In some embodiments, the alkylation technique comprises an alkylation incubation time of about 5 minutes to about 60 minutes, such as about any of 15 minutes, 20 minutes, 25 minutes, 30 minutes, 35 minutes, or 40 minutes, wherein the alkylation incubation time is performed at a temperature of about 15° C. to about 30° C., such about any of 20° C., 21° C., 22° C., 23° C., 24° C., 25° C. In some embodiments, the alkylation technique comprises use of an amount (containing solution based on the final concentration in the sample) of an alkylating agent, e.g., IAA, of about 15 mM to about 40 mM, such as any of about 20 mM, 20.5 mM, 21 mM, 21.5 mM, 22 mM, 22.5 mM, 23 mM, 23.5 mM, 24 mM, 24.5 mM, 25 mM, 25.5 mM, 26 mM, 26.5 mM, 27 mM, 27.5 mM, 28 mM, 28.5 mM, 29 mM, 29.5 mM, 30 mM, 30.5 mM, 31 mM, 31.5 mM, 32 mM, 32.5 mM, 33 mM, 33.5 mM, 34 mM, 34.5 mM, 35 mM, 35.5 mM, 36 mM, 36.5 mM, 37 mM, 37.5 mM, 38 mM, and an alkylation incubation time of about 5 minutes to about 60 minutes, such as about any of 15 minutes, 20 minutes, 25 minutes, 30 minutes, 35 minutes, or 40 minutes, wherein the alkylation incubation time is performed at a temperature of about 15° C. to about 30° C., such about any of 20° C., 21° C., 22° C., 23° C., 24° C., or 25° C.

[0434] The alkylation incubation temperature can be controlled by numerous techniques and combinations thereof. In some embodiments, the alkylation incubation temperature is controlled by an ambient temperature, such as room temperature. In some embodiments, the alkylation incubation temperature is controlled by a water bath. In some embodiments, the alkylation incubation temperature is controlled by a heat block. In some embodiments, the alkylation incubation temperature is controlled by a thermocycler, e.g., a thermocycler with a lid temperature control element. As described herein, in some embodiments, control of sample temperature when performed using a thermocycler is via a temperature block element. In some embodiments, temperature changes prior to and/or after the alkylation incubation time temperature are controlled by a technique described herein, such as cooling at room temperature or a ramp rate.

[0435] In some embodiments, the alkylation technique comprises subjecting a sample, or a derivative thereof, e.g., a denatured sample, to a thermal cycle. In some embodiments, the thermal cycle comprises subjecting the sample, or a derivative thereof, to one or more of: (a) a block starting temperature (b) block set temperature (the temperature for the alkylation incubation time); (c) a block ending temperature; (d) one or more ramp rates between temperature changes in the thermal cycle (such as between the block starting temperature and the block set temperature or between the block set temperature and the block ending temperature); and (e) a lid temperature relative to the block temperature. In some embodiments, the thermal cycle is performed, in whole or in part, using a thermocycler. In some embodiments, the thermal cycle is configured to reduce and/or prevent loss of sample, such as by escaping vapor and/or condensation when the sample container is opened. In some embodiments, the thermal cycle comprises a set block temperature of about 15° C. to about 30° C., such as any of 15° C. to about 25° C., about 20° C. to about 30° C., or about 20° C. to about 25° C., including about any of 20° C., 21° C., 22° C., 23° C., 24° C., or 25° C. In some embodiments, the thermal cycle comprises: (a) a set block temperature of about 15° C. to about 30° C., such as any of 15° C. to about 25° C., about 20° C. to about 30° C., or about 20° C. to about 25° C., including about any of 20° C., 21° C., 22° C., 23° C., 24° C., 25° C., and (b) a block ending temperature of about 15° C. to about 35° C., such as any of about 20° C. to about 35° C., or about 20° C. to about 25° C. In some embodiments, the thermal cycle comprises: (a) starting block temperature of about 15° C. to about 30° C., such as any of 15° C. to about 25° C., about 20° C. to about 30° C., or about 20° C. to about 25° C., including about any of 20° C., 21° C., 22° C., 23° C., 24° C., 25° C., (b) a set block temperature of about 15° C. to about 30° C., such as any of 15° C. to about 25° C., about 20° C. to about 30° C., or about 20° C. to about 25° C., including about any of 20° C., 21° C., 22° C., 23° C., 24° C., 25° C., and (c) a block ending temperature of about 15° C. to about 35° C., such as any of about 20° C. to about 35° C., or about 20° C. to about 25° C. In any of the thermal cycles described herein, in some embodiments, the lid temperature during the thermal cycle is configured to reduce and/or inhibit condensate formation near or on the lid of a sample container. In some embodiments, the lid temperature during the thermal cycle is at least about 2° C., such as at least about any of 2.5° C., 3° C., 3.5° C., 4° C., 4.5° C., 5° C., 5.5° C., 6° C., 6.5° C., 7° C., 7.5° C., 8° C., 8.5° C., 9° C., 9.5° C., 10° C., 11° C., 12° C., 13° C., 14° C., 15° C., 16° C., 17° C., 18° C., 19° C., or 20° C., higher than the respective temperature of the block during the thermal cycle. In some embodiments, the lid temperature during at least a portion of a thermal cycle is about 102° C. to about 120° C., such as about any of 103° C., 104° C., 105° C., 106° C., 107° C., 108° C., 109° C., or 110° C.

[0436] In some embodiments, the alkylation technique further comprises quenching the alkylating agent comprising use of a neutralizing agent. In some embodiments, the neutralizing agent is a reducing agent. In some embodiments, the reducing agent is dithiothreitol (DTT), tris(2-carboxyethyl) phosphine (TCEP), beta-mercaptoethanol (BME), or a cysteine, or any mixture thereof. In some embodiments, the neutralizing agent is added in an amount to fully quench the amount of the alkylating agent, such as in an amount greater than or equal to a molar amount of an active moiety of the alkylating agent. In some embodiments, the amount (as assessed based on the final concentration in the sample containing solution) of the neutralizing agent is about 1 mM to about 100 mM.

[0437] In some embodiments, the alkylation technique, in whole or in part, is performed substantially in a low light condition. In some embodiments, the alkylation incubation time is performed in a low light condition. In some embodiments, the low light condition is in the dark or a location substantially devoid of sunlight and/or room lighting, such as in a desk drawer. In some embodiments, the low light condition is a filtered light, such as red light.

[0438] In some embodiments, the alkylating agent is sourced from a stock solution. In some embodiments, the stock solution is prepared within about 1 hour, such as within about any of 50 minutes, 40 minutes, 30 minutes, 20 minutes, or 10 minutes, of use.

[0439] In some embodiments, the ramp rate between a temperature change in a thermal cycle (such as between a block starting temperature and a block set temperature and/or between a block set temperature a the block ending temperature) is about 1° C./second to about 10° C./second, such as any of 1° C./second, 1.5° C./second, 2° C./second, 2.5° C./second, 3° C./second, 3.5° C./second, 4° C./second, 4.5° C./second, 5° C./second, 5.5° C./second, 6° C./second, 6.5° C./second, 7° C./second, 7.5° C./second, 8° C./second, 8.5° C./second, 9° C./second, 9.5° C./second, or 10° C./second.

### IV. Proteolytic Digestion Techniques

[0440] In certain aspects, the methods provided herein comprise performing a proteolytic digestion technique. In some embodiments, the proteolytic digestion technique is performed on a sample, or a derivative thereof, following thermal denaturation and/or any additional steps intended to expose protease cleavage sites. Proteolytic digestion techniques, generally speaking, cleave polypeptides at known cleavage sites. For example, trypsin is a serine protease that generally cleaves polypeptides at the carboxyl side (C-terminal side) of lysine and arginine residues. Certain exceptions apply to the cleavage pattern of trypsin, such as due to proximity of a proline residue and/or a post-translational modification causing steric hindrance relative to the cleavage site. Proteolytic digestion techniques described herein comprise subjecting a sample, or a derivative thereof (e.g., a denatured sample or an alkylated sample, including an alkylated sample subjected to a reduction technique prior to an alkylation technique), to an amount of one or more proteases and incubating for a digestion incubation time performed at a temperature or range thereof.

[0441] In some embodiments, each of the one or more proteases is trypsin, LysC, LysN, AspN, GluC, ArgC, IdeS, IdeZ, PNGase F, thermolysin, pepsin, elastase, TEV, or Factor Xa, or any mixture thereof. In some embodiments, wherein two or more proteases are used, the weight ratio between a first protease and a second protease is about 1:10 to about 10:1, such as about any of about 1:9, 1:8, 1:7: 1:6, 1:5, 1:4, 1:3, 1:2, or 1:1. In some embodiments, the one or more proteases is trypsin. In some embodiments, the one or more proteases is a mixture of trypsin and LysC, such as in a weight ratio of about 1:1. In some embodiments, the one or more proteases is selected based on the type and/or characteristic of a biological sample used in the methods herein. In some embodiments, the biological sample is a plasma sample, wherein the one or more proteases is trypsin and Lys-C, such as in a weight ratio of about 1:1. In some embodiments, the biological sample is a serum sample, wherein the one or more proteases is trypsin. In some embodiments, the protease is a modified protease, such as comprising a modification to prevent or inhibit self-proteolysis. In some embodiments, the modified protease is a modified trypsin, such as a methylated and/or an acetylated trypsin. In some embodiments, the modified trypsin is a tosyl phenylalanyl chloromethyl ketone (TPCK)-treated trypsin.

[0442] In some embodiments, the amount of a protease, e.g., trypsin or LysC, used in a proteolytic digestion technique is based on a weight ratio relative to the polypeptide content of a sample, or a derivative thereof, (i.e., weight of a protease: weight of polypeptide content) of about 1:200 to about 1:10, such as any of about 1:100 to about 1:10, about 1:50 to about 1:10, about 1:40 to about 1:20, about 1:50 to about 1:30, about 1:45 to about 1:35, about 1:20 to about 1:40, about 1:30 to about 1:10, or about 1:25 to about 1:15. In some embodiments, the amount of a protease used in a proteolytic digestion technique is at least about 1:200, such as at least about any of 1:190, 1:180, 1:170, 1:160, 1:150, 1:140, 1:130, 1:120, 1:110, 1:100, 1:95, 1:90, 1:85, 1:80, 1:75, 1:70, 1:65, 1:60, 1:55, 1:50, 1:45, 1:40, 1:35, 1:30, 1:25, 1:20, 1:15, or 1:10. In some embodiments, the amount of a protease used in a proteolytic digestion technique is about 1:10 or less, such as about any of 1:15 or less, 1:20 or less, 1:25 or less, 1:30 or less, 1:35 or less, 1:40 or less, 1:45 or less, 1:50 or less, 1:55 or less, 1:60 or less, 1:65 or less, 1:70 or less, 1:75 or less, 1:80 or less, 1:85 or less, 1:90 or less, 1:95 or less, 1:100 or less, 1:110 or less, 1:120 or less, 1:130 or less, 1:140 or less, 1:150 or less, 1:160 or less, 1:170 or less, 1:180 or less, 1:190 or less, or 1:200 or less. In some embodiments, the amount of a protease used in a proteolytic digestion technique is about any of 1:10, 1:15, 1:20, 1:25, 1:30, 1:35, 1:40, 1:45, 1:50, 1:55, 1:60, 1:65, 1:70, 1:75, 1:80, 1:85, 1:90, 1:95, 1:100, 1:110, 1:120, 1:130, 1:140, 1:150, 1:160, 1:170, 1:180, 1:190, or 1:200. In some embodiments, the proteolytic digestion technique comprises the use of two or more proteases, such as a combination of trypsin and LysC, and in such embodiments, the amount of each protease (such as described above) can be summed to a total amount of proteases used in a proteolytic digestion technique.

[0443] In some embodiments, the proteolytic digestion incubation time is about 20 minutes to about 36 hours, such as any of about 1 hour to about 18 hours, about 5 hours to about 24 hours, about 12 hours to about 24 hours, about 16 hours to about 20 hours, or about 12 hours to about 36 hours. In some embodiments, the proteolytic digestion incubation time is about 36 hours or less, such as about any of 32 hours or less, 30 hours or less, 28 hours or less, 26 hours or less, 24 hours or less, 22 hours or less, 20 hours or less, 19 hours or less, 18 hours or less, 17 hours or less, 16 hours or less, 15 hours or less, 14 hours or less, 13 hours or less, 12 hours or less, 11 hours or less, 10 hours or less, 9 hours or less, 8 hours or less, 7 hours or less, 6 hours or less, 5 hours or less, 4 hours or less, 3 hours or less, 2 hours or less, or 1 hours or less. In some embodiments, the proteolytic digestion incubation time is at least about 20 minutes, such as at least about any of 30 minutes, 40 minutes, 50 minutes, 1 hour, 2 hours, 3 hours, 4 hours, 5 hours, 6 hours, 7 hours, 8 hours, 9 hours, 10 hours, 11 hours, 12 hours, 13 hours, 14 hours, 15 hours, 16 hours, 17 hours, 18 hours, 19 hours, 20 hours, 22 hours, 24 hours, 26 hours, 28 hours, 30 hours, 32 hours, 34 hours, or 36 hours. In some embodiments, the proteolytic digestion incubation time is about any of 20 minutes, 30 minutes, 40 minutes, 50 minutes, 1 hour, 2 hours, 3 hours, 4 hours, 5 hours, 6 hours, 7 hours, 8 hours, 9 hours, 10 hours, 11 hours, 12 hours, 13 hours, 14 hours, 15 hours, 16 hours, 17 hours, 18 hours, 19 hours, 20 hours, 22 hours, 24 hours, 26 hours, 28 hours, 30 hours, 32 hours, 34 hours, or 36 hours.

[0444] In some embodiments, the digestion incubation time is performed at a temperature of about 20° C. to about 60° C., such as any of about 20° C. to about 25° C., about 20° C. to about 30° C., about 25° C. to about 40° C., about 35° C. to about 40° C., or about 35° C. to about 50° C. In some embodiments, the digestion incubation time is performed at a temperature of at least about 20° C., such as at least about any of 21° C., 22° C., 23° C., 24° C., 25° C., 26° C., 27° C., 28° C., 29° C., 30° C., 31° C., 32° C., 33° C., 34° C., 35° C., 36° C., 37° C., 38° C., 39° C., 40° C., 42° C., 44° C., 46° C., 48° C., 50° C., 52° C., 54° C., 56° C., 58° C., or 60° C. In some embodiments, the digestion incubation time is performed at a temperature of about 60° C. or less, such about any of 58° C. or less, 56° C. or less, 54° C. or less, 52° C. or less, 50° C. or less, 48° C. or less, 46° C. or less, 44° C. or less, 42° C. or less, 40° C. or less, 39° C. or less, 38° C. or less, 37° C. or less, 36° C. or less, 35° C. or less, 34° C. or less, 33° C. or less, 32° C. or less, 31° C. or less, 30° C. or less, 29° C. or less, 28° C. or less, 27° C. or less, 26° C. or less, 25° C. or less, 24° C. or less, 23° C. or less, 22° C. or less, 21° C. or less, or 20° C. or less. In some embodiments, the digestion incubation time is performed at a temperature of about any of 20° C., 21° C., 22° C., 23° C., 24° C., 25° C., 26° C., 27° C., 28° C., 29° C., 30° C., 31° C., 32° C., 33° C., 34° C., 35° C., 36° C., 37° C., 38° C., 39° C., 40° C., 42° C., 44° C., 46° C., 48° C., 50° C., 52° C., 54° C., 56° C., 58° C., or 60° C. In some embodiments, the reduction incubation time is performed at a room temperature.

[0445] In some embodiments, the proteolytic digestion technique comprises a digestion incubation time of about 12 hours to about 24 hours, such as about any of 13 hours, 14 hours, 15 hours, 16 hours, 17 hours, 18 hours, 19 hours, 20 hours, 21 hours, 22 hours, 23 hours, wherein the digestion incubation time is performed at a temperature of about 20° C. to about 40° C., such about any of 22° C., 24° C., 26° C., 28° C., 30° C., 31° C., 32° C., 33° C., 34° C., 35° C., 36° C., 37° C., 38° C., 39° C. In some embodiments, the proteolytic digestion technique comprises use of an amount a protease for each of one or more proteases, e.g., trypsin and/or LysC, of about 1:15 to about 1:45, such as about any of 1:20, 1:25, 1:30, 1:35, or 1:40 (as measured based on the amount of the protease to the amount of polypeptide in a sample or a derivative thereof), and a digestion incubation time of about 12 hours to about 24 hours, such as about any of 13 hours, 14 hours, 15 hours, 16 hours, 17 hours, 18 hours, 19 hours, 20 hours, 21 hours, 22 hours, 23 hours, wherein the digestion incubation time is performed at a temperature of about 20° C. to about 40° C., such about any of 22° C., 24° C., 26° C., 28° C., 30° C., 31° C., 32° C., 33° C., 34° C., 35° C., 36° C., 37° C., 38° C., 39° C. In some embodiments, the proteolytic digestion technique is performed on a plasma sample or a derivate thereof, wherein the proteolytic digestion technique comprises a 1:40 ratio of trypsin to polypeptide in the sample of the derivative thereof and a 1:40 ratio of LysC to polypeptide in the sample or the derivative thereof. In some embodiments, the proteolytic digestion technique is performed on a serum sample or a derivate thereof, wherein the proteolytic digestion technique comprises a 1:20 ratio of trypsin.

[0446] The digestion incubation temperature can be controlled by numerous techniques and combinations thereof. In some embodiments, the digestion incubation temperature is controlled by an ambient temperature, such as room temperature. In some embodiments, the digestion incubation temperature is controlled by a water bath. In some embodiments, the digestion incubation temperature is controlled by a heat block. In some embodiments, the digestion incubation temperature is controlled by a thermocycler, e.g., a thermocycler with a lid temperature control element. As described herein, in some embodiments, control of sample temperature when performed using a thermocycler is via a temperature block element. In some embodiments, temperature changes prior to and/or after the digestion incubation time temperature are controlled by a technique described herein, such as cooling at room temperature or a ramp rate.

[0447] In some embodiments, the proteolytic digestion technique comprises subjecting a sample, or a derivative thereof, e.g., an alkylated sample (including an alkylated sample quenched with a neutralizing agent), to a thermal cycle. In some embodiments, the thermal cycle comprises subjecting the sample, or a derivative thereof, to one or more of: (a) a block starting temperature (b) block set temperature (the temperature for the digestion incubation time); (c) a block ending temperature; (d) one or more ramp rates between temperature changes in the thermal cycle (such as between the block starting temperature and the block set temperature or between the block set temperature and the block ending temperature); and (e) a lid temperature relative to the block temperature. In some embodiments, the thermal cycle is performed, in whole or in part, using a thermocycler. In some embodiments, the thermal cycle is configured to reduce and/or prevent loss of sample, such as by escaping vapor and/or condensation when the sample container is opened. In some embodiments, the thermal cycle comprises a set block temperature of about 20° C. to about 50° C., including about any of 22° C., 24° C., 26° C., 28° C., 30° C., 31° C., 32° C., 33° C., 34° C., 35° C., 36° C., 37° C., 38° C., 39° C., 40° C., 42° C., 44° C., 46° C., 48° C.

[0448] In some embodiments, the thermal cycle comprises: (a) a set block temperature of about 20° C. to about 50° C., including about any of 22° C., 24° C., 26° C., 28° C., 30° C., 31° C., 32° C., 33° C., 34° C., 35° C., 36° C., 37° C., 38° C., 39° C., 40° C., 42° C., 44° C., 46° C., 48° C., and (b) a block ending temperature of about 15° C. to about 35° C., such as any of about 20° C. to about 35° C., or about 20° C. to about 25° C. In some embodiments, the thermal cycle comprises: (a) starting block temperature of about 15° C. to about 35° C., such as any of about 20° C. to about 35° C., or about 20° C. to about 25° C., (b) a set block temperature of about 20° C. to about 50° C., including about any of 22° C., 24° C., 26° C., 28° C., 30° C., 31° C., 32° C., 33° C., 34° C., 35° C., 36° C., 37° C., 38° C., 39° C., 40° C., 42° C., 44° C., 46° C., 48° C., and (c) a block ending temperature of about 15° C. to about 35° C., such as any of about 20° C. to about 35° C., or about 20° C. to about 25° C. In any of the thermal cycles described herein, in some embodiments, the lid temperature during the thermal cycle is configured to reduce and/or inhibit condensate formation near or on the lid of a sample container. In some embodiments, the lid temperature during the thermal cycle is at least about 2° C., such as at least about any of 2.5° C., 3° C., 3.5° C., 4° C., 4.5° C., 5° C., 5.5° C., 6° C., 6.5° C., 7° C., 7.5° C., 8° C., 8.5° C., 9° C., 9.5° C., 10° C., 11° C., 12° C., 13° C., 14° C., 15° C., 16° C., 17° C., 18° C., 19° C., or 20° C., higher than the respective temperature of the block during the thermal cycle. In some embodiments, the lid temperature during at least a portion of a thermal cycle is about 102° C. to about 120° C., such as about any of 103° C., 104° C., 105° C., 106° C., 107° C., 108° C., 109° C., or 110° C.

[0449] In some embodiments, the ramp rate between a temperature change in a thermal cycle (such as between a block starting temperature and a block set temperature and/or between a block set temperature a the block ending temperature) is about 1° C./second to about 10° C./second, such as any of 1° C./second, 1.5° C./second, 2° C./second, 2.5° C./second, 3° C./second, 3.5° C./second, 4° C./second, 4.5° C./second, 5° C./second, 5.5° C./second, 6° C./second, 6.5° C./second, 7° C./second, 7.5° C./second, 8° C./second, 8.5° C./second, 9° C./second, 9.5° C./second, or 10° C./second.

[0450] In some embodiments, the proteolytic digestion technique further comprises quenching the one or more proteolytic enzymes. In some embodiments, quenching the one or more proteolytic enzymes comprises denaturing the one or more proteolytic enzymes. In some embodiments, quenching the one or more proteolytic enzymes comprise adding an amount of an acid. In some embodiments, the acid is formic acid (FA) or trifluoroacetic acid (TFA), or a mixture thereof. In some embodiments, the amount (as assessed based on the final concentration in the sample containing solution) of the acid added is about any of 0.1% v/v, 0.2% v/v, 0.3% v/v, 0.4% v/v, 0.5% v/v, 0.6% v/v, 0.7% v/v, 0.8% v/v, 0.9% v/v, 1% v/v, 1.1% v/v, 1.2% v/v, 1.3% v/v, 1.4% v/v, 1.5% v/v, 1.6% v/v, 1.7% v/v, 1.8% v/v, 1.9% v/v, or 2% v/v.

### V. Additional Techniques

[0451] In certain aspects, the method provided herein comprise subjecting the proteolytically digested sample comprising a proteolytic glycopeptide to one or more additional steps prior to subjecting the proteolytically digested sample, or a derivative thereof, to a liquid chromatography-mass spectrometry (LC-MS) technique using a liquid chromatography system and a mass spectrometer. In some embodiments, the LC system is online with the MS (i.e., eluate from the LC system is directly introduced to the MS). In some embodiments, the one or more additional steps do not include a desalting step performed outside of the LC system (such as an offline desalting technique).

[0452] In some embodiments, the method further comprises adding a standard to the proteolytically digested sample prior to the LC-MS technique. In some embodiments, the standard is a stable isotope-internal standard (SI-IS) peptide mixture.

[0453] In some embodiments, the biological sample is not subjected to a high-abundant protein depletion technique prior to the thermal denaturation technique. For example, in some embodiments, the high-abundant protein depletion technique removes highly abundant proteins present in a blood sample, such as serum albumin.

### E2. Methods for Performing a LC-MS Analysis of a Proteolytic Glycopeptide

[0454] In certain aspects, provided herein is a method for performing a LC-MS analysis on a sample comprising a proteolytic glycopeptide. In some embodiments, the liquid chromatography (LC) system is online with a mass spectrometer (i.e., proteolytic peptide species, including glycopeptides, are eluted from the LC system directing into the mass spectrometer via a mass spectrometer interface. In some embodiments, the LC technique comprises performing a chromatographic separation of one or more proteolytic peptides, including glycopeptides. In some embodiments, the one or more proteolytic peptides subjected to a chromatographic separation are obtained from a proteolytically digested sample, such as described herein. In some embodiments, the chromatographic separation is performed on a proteolytically digested sample, such as described herein, (e.g., no additional separation technique, such as a sample clean-up step, is performed to remove one or more components from proteolytically digested sample). In some embodiments, the chromatographic separation is performed on a proteolytically digested sample comprising at least about 5 mM of a buffer, such as ammonium bicarbonate. In some embodiments, the chromatographic separation is performed on a proteolytically digested sample comprising an amount, such as at least about 1 mM, of a reducing agent or a byproduct thereof, such as a stable six-membered ring with an internal disulfide bond derived from DTT. In some embodiments, the chromatographic separation is performed on a proteolytically digested sample comprising an amount, such as at least about 1 mM, of an alkylating agent or a byproduct thereof, such as iodide (I⁻) derived from IAA.

[0455] In some embodiments, the method comprises introducing the proteolytically digested sample to a LC-MS system. In some embodiments, the method comprises performing a chromatographic separation of the proteolytically digested sample.

[0456] In some embodiments, the chromatographic separation comprises a gradient separation performing using mixtures of an aqueous mobile phase and an organic mobile phase. In some embodiments, the chromatographic separation comprises isocratic period, such as a period of at least about 90%, such as at least about any of 91%, 92%, 93%, 94%, 95%, 96%, 97%, 98%, 99%, or 100%, of an aqueous mobile phase to produce the initial eluate that is diverted from the mass spectrometer interface.

[0457] In some embodiments, the LC system comprises a reversed-phase chromatography column. In some embodiments, the reversed-phase column comprises an alkyl moiety, such as C18.

[0458] The present application contemplates a diverse array of additional features of LC-MS techniques for analyzing a sample comprising a glycopeptide using a mass spectrometer. In some embodiments, the liquid chromatography system comprises a high performance liquid chromatography system. In some embodiments, the liquid chromatography system comprises an ultra-high performance liquid chromatography system. In some embodiments, the liquid chromatography system comprises a high-flow liquid chromatography system. In some embodiments, the liquid chromatography system comprises a low-flow liquid chromatography system, such as a micro-flow liquid chromatography system or a nano-flow liquid chromatography system. In some embodiments, the liquid chromatography system is coupled, such as directly interfaced, with a mass spectrometer.

[0459] In some embodiment, the mass spectrometry technique comprises an ionization technique. Ionization techniques contemplated by the present application include techniques capable of charging polypeptides and peptide products, including glycopeptides. Thus, in some embodiments, the ionization technique is electrospray ionization. In some embodiments, the ionization technique is nano-electrospray ionization. In some embodiments, the ionization technique is atmospheric pressure chemical ionization. In some embodiments, the ionization technique is atmospheric pressure photoionization.

[0460] A diverse array of mass spectrometers are contemplated as compatible with the description, include high-resolution mass spectrometers and low-resolution mass spectrometers. In some embodiments, the mass spectrometer is a time-of-flight (TOF) mass spectrometer. In some embodiments, the mass spectrometer is a quadrupole time-of-flight (Q-TOF) mass spectrometer. In some embodiments, the mass spectrometer is a quadrupole ion trap time-of-flight (QIT-TOF) mass spectrometer. In some embodiments, the mass spectrometer is an ion trap. In some embodiments, the mass spectrometer is a single quadrupole. In some embodiments, the mass spectrometer is a triple quadrupole (QQQ). In some embodiments, the mass spectrometer is an orbitrap. In some embodiments, the mass spectrometer is a quadrupole orbitrap. In some embodiments, the mass spectrometer is a fourier transform ion cyclotron resonance (FT) mass spectrometer. In some embodiments, the mass spectrometer is a quadrupole fourier transform ion cyclotron resonance (Q-FT) mass spectrometer. In some embodiments, the mass spectrometry technique comprises positive ion mode. In some embodiments, the mass spectrometry technique comprises negative ion mode. In some embodiments, the mass spectrometry technique comprises an ion mobility mass spectrometry technique.

[0461] In some embodiments, the LC-MS technique comprises processing obtained signals MS from the mass spectrometer. In some embodiments, the LC-MS technique comprises peak detection. In some embodiments, the LC-MS technique comprises determining ionization intensity of an ionized peptide product. In some embodiments, the LC-MS technique comprises determining peak height of an ionized peptide product. In some embodiments, the LC-MS technique comprises determining peak area of an ionized peptide product. In some embodiments, the LC-MS technique comprises determining peak volume of an ionized peptide product. In some embodiments, the LC-MS technique comprises identifying an ionized peptide product by amino acid sequence. In some embodiments, the LC-MS technique comprises determining the site of a post-translational modification of an ionized peptide, such as the site of a glycosylation. In some embodiments, the LC-MS technique comprises determining the glycan structure, or a characteristic thereof, of an ionized peptide product. In some embodiments, the LC-MS technique comprises manually validating the ionized peptide product acid sequence assignments. In some embodiments, the LC-MS technique comprises a quantification technique.

### F2. Exemplary Methods

[0462] In certain aspects, provided is a method for processing a proteolytically digested sample to produce a processed sample suitable for use in a liquid chromatography-mass spectrometry (LC-MS) analysis, wherein the proteolytically digested sample comprises a plurality of proteolytic polypeptides comprising at least one proteolytic glycopeptide, the method comprising subjecting the proteolytically digested sample to a solid phase extraction column comprising a reversed-phase medium to associate at least a portion of the plurality of proteolytic polypeptides with the reversed-phase medium, the subjecting comprising a polypeptide loading amount of about 50% or less of a binding capacity of the reversed-phase medium, wherein the binding capacity of the reversed-phase medium is based on an insulin load having 10% or less breakthrough; subjecting the reversed-phase medium comprising the associated proteolytic polypeptides to a wash buffer; and subjecting the reversed-phase medium comprising the associated proteolytic polypeptides to an elution buffer to produce the processed sample. In some embodiments, the reversed-phase medium comprises an alkyl-based moiety comprising an octadecyl carbon functional group (C18) covalently bound to a silica solid phase, wherein the silica solid phase comprises a plurality of particles having an average largest cross-sectional distance (such as a diameter, e.g., as measured by dynamic light scattering) of about 20 μm, and wherein the each particle of the plurality of particles comprises an average pore size of about 150 Å, and wherein the pores are derivitized with the alkyl-based moiety. In some embodiments, the solid phase extraction column comprising the reversed-phase medium has a column volume of about 5 μL. In some embodiments, the solid phase extraction column is an AssayMap 5 μL C18 cartridge (catalog no. 5190-6532; Agilent Technologies). In some embodiments, the reversed-phase medium comprises an underivitized polystyrene divinylbenzene hydrophobic reversed-phase resin, wherein the polystyrene divinylbenzene hydrophobic reversed-phase resin comprises a plurality of particles having an average largest cross-sectional distance (such as a diameter, e.g., as measured by dynamic light scattering) of about 20 μm, and wherein the each particle of the plurality of particles comprises an average pore size of about 100 Å. In some embodiments, the solid phase extraction column comprising the reversed-phase medium has a column volume of about 5 μL. In some embodiments, the solid phase extraction column is an AssayMAP 5 μL Reversed Phase (RP-S) cartridge (catalog no. G5496-60033; Agilent Technologies). In some embodiments, the proteolytic glycopeptide comprises a glycan structure comprising one or more sialic acid moieties.

[0463] In other aspects, provided is a method for processing a proteolytically digested sample to produce a processed sample suitable for use in a liquid chromatography-mass spectrometry (LC-MS) analysis, wherein the proteolytically digested sample comprises a plurality of proteolytic polypeptides comprising at least one proteolytic glycopeptide, the method comprising subjecting the proteolytically digested sample to a solid phase extraction column comprising a reversed-phase medium to associate at least a portion of the plurality of proteolytic polypeptides with the reversed-phase medium, the subjecting comprising a polypeptide loading concentration of about 0.6 μg/μL or less; subjecting the reversed-phase medium comprising the associated proteolytic polypeptides to a wash buffer; and subjecting the reversed-phase medium comprising the associated proteolytic polypeptides to an elution buffer to produce the processed sample. In some embodiments, the reversed-phase medium comprises an alkyl-based moiety comprising an octadecyl carbon functional group (C18) covalently bound to a silica solid phase, wherein the silica solid phase comprises a plurality of particles having an average largest cross-sectional distance (such as a diameter, e.g., as measured by dynamic light scattering) of about 20 μm, and wherein the each particle of the plurality of particles comprises an average pore size of about 150 Å, and wherein the pores are derivitized with the alkyl-based moiety. In some embodiments, the solid phase extraction column comprising the reversed-phase medium has a column volume of about 5 μL. In some embodiments, the solid phase extraction column is an AssayMap 5 μL C18 cartridge (catalog no. 5190-6532; Agilent Technologies). In some embodiments, the reversed-phase medium comprises an underivitized polystyrene divinylbenzene hydrophobic reversed-phase resin, wherein the polystyrene divinylbenzene hydrophobic reversed-phase resin comprises a plurality of particles having an average largest cross-sectional distance (such as a diameter, e.g., as measured by dynamic light scattering) of about 20 μm, and wherein the each particle of the plurality of particles comprises an average pore size of about 100 Å. In some embodiments, the solid phase extraction column comprising the reversed-phase medium has a column volume of about 5 μL. In some embodiments, the solid phase extraction column is an AssayMAP 5 μL Reversed Phase (RP-S) cartridge (catalog no. G5496-60033; Agilent Technologies). In some embodiments, the proteolytic glycopeptide comprises a glycan structure comprising one or more sialic acid moieties.

[0464] In other aspects, provided is a method for processing a proteolytically digested sample to produce a processed sample suitable for use in a liquid chromatography-mass spectrometry (LC-MS) analysis, wherein the proteolytically digested sample comprises a plurality of proteolytic polypeptides comprising at least one proteolytic glycopeptide, the method comprising subjecting the proteolytically digested sample to a solid phase extraction column comprising a reversed-phase medium to associate at least a portion of the plurality of proteolytic polypeptides with the reversed-phase medium; subjecting the reversed-phase medium comprising the associated proteolytic polypeptides to a wash buffer at a wash flow rate of about 0.1 column volumes/minute to about 2 column volumes/minute; and subjecting the reversed-phase medium comprising the associated proteolytic polypeptides to an elution buffer to produce the processed sample. In some embodiments, the reversed-phase medium comprises an alkyl-based moiety comprising an octadecyl carbon functional group (C18) covalently bound to a silica solid phase, wherein the silica solid phase comprises a plurality of particles having an average largest cross-sectional distance (such as a diameter, e.g., as measured by dynamic light scattering) of about 20 μm, and wherein the each particle of the plurality of particles comprises an average pore size of about 150 Å, and wherein the pores are derivitized with the alkyl-based moiety. In some embodiments, the solid phase extraction column comprising the reversed-phase medium has a column volume of about 5 μL. In some embodiments, the solid phase extraction column is an AssayMap 5 μL C18 cartridge (catalog no. 5190-6532; Agilent Technologies). In some embodiments, the reversed-phase medium comprises an underivitized polystyrene divinylbenzene hydrophobic reversed-phase resin, wherein the polystyrene divinylbenzene hydrophobic reversed-phase resin comprises a plurality of particles having an average largest cross-sectional distance (such as a diameter, e.g., as measured by dynamic light scattering) of about 20 μm, and wherein the each particle of the plurality of particles comprises an average pore size of about 100 Å. In some embodiments, the solid phase extraction column comprising the reversed-phase medium has a column volume of about 5 μL. In some embodiments, the solid phase extraction column is an AssayMAP 5 μL Reversed Phase (RP-S) cartridge (catalog no. G5496-60033; Agilent Technologies). In some embodiments, the proteolytic glycopeptide comprises a glycan structure comprising one or more sialic acid moieties.

[0465] In certain aspects, provided is a method for processing a proteolytically digested sample to produce a processed sample suitable for use in a liquid chromatography-mass spectrometry (LC-MS) analysis, wherein the proteolytically digested sample comprises a plurality of proteolytic polypeptides comprising at least one proteolytic glycopeptide, the method comprising subjecting the proteolytically digested sample to a solid phase extraction column comprising a reversed-phase medium to associate at least a portion of the plurality of proteolytic polypeptides with the reversed-phase medium, the subjecting comprising a polypeptide loading amount of about 50% or less of a binding capacity of the reversed-phase medium, wherein the binding capacity of the reversed-phase medium is based on an insulin load having 10% or less breakthrough, and wherein the subjecting comprising a polypeptide loading concentration of about 0.6 μg/μL or less; subjecting the reversed-phase medium comprising the associated proteolytic polypeptides to a wash buffer; and subjecting the reversed-phase medium comprising the associated proteolytic polypeptides to an elution buffer to produce the processed sample. In some embodiments, the reversed-phase medium comprises an alkyl-based moiety comprising an octadecyl carbon functional group (C18) covalently bound to a silica solid phase, wherein the silica solid phase comprises a plurality of particles having an average largest cross-sectional distance (such as a diameter, e.g., as measured by dynamic light scattering) of about 20 μm, and wherein the each particle of the plurality of particles comprises an average pore size of about 150 Å, and wherein the pores are derivitized with the alkyl-based moiety. In some embodiments, the solid phase extraction column comprising the reversed-phase medium has a column volume of about 5 μL. In some embodiments, the solid phase extraction column is an AssayMap 5 μL C18 cartridge (catalog no. 5190-6532; Agilent Technologies). In some embodiments, the reversed-phase medium comprises an underivitized polystyrene divinylbenzene hydrophobic reversed-phase resin, wherein the polystyrene divinylbenzene hydrophobic reversed-phase resin comprises a plurality of particles having an average largest cross-sectional distance (such as a diameter, e.g., as measured by dynamic light scattering) of about 20 μm, and wherein the each particle of the plurality of particles comprises an average pore size of about 100 Å. In some embodiments, the solid phase extraction column comprising the reversed-phase medium has a column volume of about 5 μL. In some embodiments, the solid phase extraction column is an AssayMAP 5 μL Reversed Phase (RP-S) cartridge (catalog no. G5496-60033; Agilent Technologies). In some embodiments, the proteolytic glycopeptide comprises a glycan structure comprising one or more sialic acid moieties.

[0466] In certain aspects, provided is a method for processing a proteolytically digested sample to produce a processed sample suitable for use in a liquid chromatography-mass spectrometry (LC-MS) analysis, wherein the proteolytically digested sample comprises a plurality of proteolytic polypeptides comprising at least one proteolytic glycopeptide, the method comprising subjecting the proteolytically digested sample to a solid phase extraction column comprising a reversed-phase medium to associate at least a portion of the plurality of proteolytic polypeptides with the reversed-phase medium, the subjecting comprising a polypeptide loading amount of about 50% or less of a binding capacity of the reversed-phase medium, wherein the binding capacity of the reversed-phase medium is based on an insulin load having 10% or less breakthrough; subjecting the reversed-phase medium comprising the associated proteolytic polypeptides to a wash buffer at a wash flow rate of about 0.1 column volumes/minute to about 2 column volumes/minute; and subjecting the reversed-phase medium comprising the associated proteolytic polypeptides to an elution buffer to produce the processed sample. In some embodiments, the reversed-phase medium comprises an alkyl-based moiety comprising an octadecyl carbon functional group (C18) covalently bound to a silica solid phase, wherein the silica solid phase comprises a plurality of particles having an average largest cross-sectional distance (such as a diameter, e.g., as measured by dynamic light scattering) of about 20 μm, and wherein the each particle of the plurality of particles comprises an average pore size of about 150 Å, and wherein the pores are derivitized with the alkyl-based moiety. In some embodiments, the solid phase extraction column comprising the reversed-phase medium has a column volume of about 5 μL. In some embodiments, the solid phase extraction column is an AssayMap 5 μL C18 cartridge (catalog no. 5190-6532; Agilent Technologies). In some embodiments, the reversed-phase medium comprises an underivitized polystyrene divinylbenzene hydrophobic reversed-phase resin, wherein the polystyrene divinylbenzene hydrophobic reversed-phase resin comprises a plurality of particles having an average largest cross-sectional distance (such as a diameter, e.g., as measured by dynamic light scattering) of about 20 μm, and wherein the each particle of the plurality of particles comprises an average pore size of about 100 Å. In some embodiments, the solid phase extraction column comprising the reversed-phase medium has a column volume of about 5 μL. In some embodiments, the solid phase extraction column is an AssayMAP 5 μL Reversed Phase (RP-S) cartridge (catalog no. G5496-60033; Agilent Technologies). In some embodiments, the proteolytic glycopeptide comprises a glycan structure comprising one or more sialic acid moieties.

[0467] In other aspects, provided is a method for processing a proteolytically digested sample to produce a processed sample suitable for use in a liquid chromatography-mass spectrometry (LC-MS) analysis, wherein the proteolytically digested sample comprises a plurality of proteolytic polypeptides comprising at least one proteolytic glycopeptide, the method comprising subjecting the proteolytically digested sample to a solid phase extraction column comprising a reversed-phase medium to associate at least a portion of the plurality of proteolytic polypeptides with the reversed-phase medium, the subjecting comprising a polypeptide loading concentration of about 0.6 μg/μL or less; subjecting the reversed-phase medium comprising the associated proteolytic polypeptides to a wash buffer at a wash flow rate of about 0.1 column volumes/minute to about 2 column volumes/minute; and subjecting the reversed-phase medium comprising the associated proteolytic polypeptides to an elution buffer to produce the processed sample. In some embodiments, the reversed-phase medium comprises an alkyl-based moiety comprising an octadecyl carbon functional group (C18) covalently bound to a silica solid phase, wherein the silica solid phase comprises a plurality of particles having an average largest cross-sectional distance (such as a diameter, e.g., as measured by dynamic light scattering) of about 20 μm, and wherein the each particle of the plurality of particles comprises an average pore size of about 150 Å, and wherein the pores are derivitized with the alkyl-based moiety. In some embodiments, the solid phase extraction column comprising the reversed-phase medium has a column volume of about 5 μL. In some embodiments, the solid phase extraction column is an AssayMap 5 μL C18 cartridge (catalog no. 5190-6532; Agilent Technologies). In some embodiments, the reversed-phase medium comprises an underivitized polystyrene divinylbenzene hydrophobic reversed-phase resin, wherein the polystyrene divinylbenzene hydrophobic reversed-phase resin comprises a plurality of particles having an average largest cross-sectional distance (such as a diameter, e.g., as measured by dynamic light scattering) of about 20 μm, and wherein the each particle of the plurality of particles comprises an average pore size of about 100 Å. In some embodiments, the solid phase extraction column comprising the reversed-phase medium has a column volume of about 5 μL. In some embodiments, the solid phase extraction column is an AssayMAP 5 μL Reversed Phase (RP-S) cartridge (catalog no. G5496-60033; Agilent Technologies). In some embodiments, the proteolytic glycopeptide comprises a glycan structure comprising one or more sialic acid moieties.

[0468] In other aspects, provided is a method for processing a proteolytically digested sample to produce a processed sample suitable for use in a liquid chromatography-mass spectrometry (LC-MS) analysis, wherein the proteolytically digested sample comprises a plurality of proteolytic polypeptides comprising at least one proteolytic glycopeptide, the method comprising: subjecting the proteolytically digested sample to a solid phase extraction column comprising a reversed-phase medium to associate at least a portion of the plurality of proteolytic polypeptides with the reversed-phase medium, the subjecting comprising a polypeptide loading amount of about 50% or less of a binding capacity of the reversed-phase medium, wherein the binding capacity of the reversed-phase medium is based on an insulin load having 10% or less breakthrough, and a polypeptide loading concentration of about 0.6 μg/μL or less; subjecting the reversed-phase medium comprising the associated proteolytic polypeptides to a wash buffer at a wash flow rate of about 0.1 column volumes/minute to about 2 column volumes/minute; and subjecting the reversed-phase medium comprising the associated proteolytic polypeptides to an elution buffer to produce the processed sample. In some embodiments, the reversed-phase medium comprises an alkyl-based moiety comprising an octadecyl carbon functional group (C18) covalently bound to a silica solid phase, wherein the silica solid phase comprises a plurality of particles having an average largest cross-sectional distance (such as a diameter, e.g., as measured by dynamic light scattering) of about 20 μm, and wherein the each particle of the plurality of particles comprises an average pore size of about 150 Å, and wherein the pores are derivitized with the alkyl-based moiety. In some embodiments, the solid phase extraction column comprising the reversed-phase medium has a column volume of about 5 μL. In some embodiments, the solid phase extraction column is an AssayMap 5 μL C18 cartridge (catalog no. 5190-6532; Agilent Technologies). In some embodiments, the reversed-phase medium comprises an underivitized polystyrene divinylbenzene hydrophobic reversed-phase resin, wherein the polystyrene divinylbenzene hydrophobic reversed-phase resin comprises a plurality of particles having an average largest cross-sectional distance (such as a diameter, e.g., as measured by dynamic light scattering) of about 20 μm, and wherein the each particle of the plurality of particles comprises an average pore size of about 100 Å. In some embodiments, the solid phase extraction column comprising the reversed-phase medium has a column volume of about 5 μL. In some embodiments, the solid phase extraction column is an AssayMAP 5 μL Reversed Phase (RP-S) cartridge (catalog no. G5496-60033; Agilent Technologies). In some embodiments, the proteolytic glycopeptide comprises a glycan structure comprising one or more sialic acid moieties.

### G2. Samples and Components Thereof

[0469] The methods provided herein are contemplated to be suitable for analyzing a diverse array of samples, such as biological samples. In some embodiments, the sample is a blood sample, such as a whole blood sample. In some embodiments, the sample is a plasma sample. In some embodiments, the sample is a serum sample. In some embodiments, the sample is a tissue sample. Plasma is a fluid component of blood that is obtained when a clotting-prevention agent is added to whole blood and then the tube is centrifuged to separate the cellular material. The upper lighter colored liquid layer in the tube is removed as plasma. Common anti-coagulant agents are EDTA (ethylenediaminetetraacetic acid), heparin, and citrate. Serum is a fluid obtained when whole blood is allowed to clot in a tube and then centrifuged so that the clotted blood, including red cells, are at the bottom of the collection tube, leaving a straw-colored liquid above the clot. The straw-colored liquid in the tube is removed as serum.

[0470] The methods provided herein are particularly useful for the analysis of biological samples comprising a glycoprotein, such as to generate glycopeptide containing specimens for analysis with a mass spectrometer. The methods provided herein, in some embodiments, enable the analysis of glycopeptides that elute during early or late phases of a reversed-phase chromatographic separation and are typically missed during conventional mass spectrometry approaches. For the situation where a sample contains hydrophilic salts and hydrophilic glycopeptides, it can be challenging to desalt the sample with a C18 solid phase extraction material without removing a significant portion of the hydrophilic glycopeptides that are needed for an analysis of the sample. For example, glycopeptides with an overall hydrophilic character may elute from a reversed-phase material, such as in a desalting column, and are washed away or not introduced to the mass spectrometer during a data acquisition phase of a mass spectrometry technique. In some embodiments, glycopeptides with an overall hydrophobic character may have a high affinity for a reversed-phase material, such as in a desalting column or a chromatography column, and are not properly eluted from a desalting column or during a data acquisition portion of a mass spectrometry technique.

[0471] In some embodiments, the method comprises an upstream sample preparation technique, such as for obtaining plasma or serum from a blood sample, performed prior to methods for proteolytically digesting a sample. In some embodiments, the upstream sample preparation technique comprises a cell lysis step. In some embodiments, the upstream sample preparation technique comprises a filtration step. In some embodiments, the upstream sample preparation technique comprises a dilution step. In some embodiments, the upstream sample preparation technique comprises a protein concentration determination step.

[0472] In some embodiments, the sample is obtained from an individual. In some embodiments, the sample is obtained from a human individual.

### H2. Systems, Kits, and Compositions

[0473] In certain aspects, contemplated herein are systems, kits, and compositions useful for performing the methods described herein. In some embodiments, provided herein is a system, kit, and/or composition useful for performing a proteolytic digestion of a biological sample comprising a glycoprotein as described herein. In some embodiments, provided herein is a system, kit, and/or composition useful for performing a LC-MS analysis of a proteolytic glycopeptide as described herein. In some embodiments, provided herein is a system, kit, and/or composition useful for performing a proteolytic digestion of a biological sample comprising a glycoprotein followed by LC-MS analysis of the proteolytic glycopeptide produced therefrom.

[0474] The present invention is not intended to be limited in scope to the particular disclosed embodiments, which are provided, for example, to illustrate various aspects of the invention. Various modifications to the compositions and methods described will become apparent from the description and teachings herein. Such variations may be practiced without departing from the true scope and spirit of the disclosure and are intended to fall within the scope of the present disclosure.

### Section 3—Absorbent or Bibulous Members Having a Polypeptide Standard and Configured for Deposition of a Blood Sample and LC-MS Analysis of Glycopeptides Therefrom

[0475] Provided herein, in certain aspects, is an absorbent or bibulous member, such as a blood spot card, comprising one or more extraction internal standards comprising at least one polypeptide standard deposited thereon prior to deposition of a blood sample. In other aspects, provided herein are one or more extraction internal standards comprising a polypeptide standard, including mixture of polypeptide standards, suitable for use in glycopolypeptide LC-MS analyses of samples obtained from an absorbent or bibulous member, such as a dried blood spot card. In other aspects, provided herein are methods for performing a liquid chromatography-mass spectrometry (LC-MS) analysis of a proteolytic glycopeptide derived from a blood sample deposited on an absorbent or bibulous member, such as a dried blood spot card, such as for the analysis of one or more biomarkers, e.g., biomarkers for the diagnosis of ovarian cancer. In other aspects, provided herein are one or more biomarkers for assessing ovarian cancer in an individual suitable for assessment of polypeptide content obtained from an absorbent or bibulous member, such as a blood spot card. The disclosure of the present application is based on the inventors' unique perspective and unexpected findings regarding the use of absorbent or bibulous members, such as blood spot cards, for the analysis of glycopolypeptides, such as proteolytic glycopeptides. As described herein, the inventors identified that the use of one or more extraction internal standards applied to an absorbent or bibulous member, such as a blood spot card, prior to deposition of a blood sample can facilitate analytical aspects of an LC-MS analysis of proteolytic peptides therefrom, such as one or more proteolytic glycopeptide. As described herein, the one or more extraction internal standards enable determination of any one or more of extraction efficiency, digestion efficiency, and a sample migration pattern such as to improve the analysis of polypeptide content, such as one or more proteolytic glycopeptides, extracted from an absorbent or bibulous member. Specifically, as described herein, it was unexpectedly found that the taught methods involving absorbent or bibulous members, such as blood spot cards, and one or more extraction internal standards enable performance of an ovarian cancer biomarker screen to accurately and reliably determine the presence of benign or non-benign ovarian cancer. Such results obtained using biomarkers useful for the techniques involving absorbent or bibulous member samples described herein were in agreement with a biomarkers for an established liquid blood-based assay. Furthermore, using the methods of performing a LC-MS analysis involving the absorbent or bibulous members described herein, the inventors identified one or more biomarkers useful for assessing ovarian cancer in an individual. In addition to the significant advantages provided by the subject matter described herein that enable LC-MS analysis of polypeptide content, such as one or more proteolytic glycopeptides, the subject matter provided herein benefits from the use of dried blood sample, e.g., reduced risk of live blood biohazards, inhibition of enzymatic activity (e.g., proteases and glycotransferases), ease of obtaining a blood sample from an individual (including the small amount of blood sample required), and ease of transportation of a blood sample from the site of obtaining to a site of analysis.

[0476] Thus, in some aspects, provided herein is a method for performing a liquid chromatography-mass spectrometry (LC-MS) analysis of a proteolytic glycopeptide derived from a blood sample deposited on a delimited zone of an absorbent or bibulous member, wherein the blood sample comprises a plurality of polypeptides comprising at least one glycoprotein, the method comprising: extracting at least a portion of the plurality of polypeptides and one or more extraction internal standards from the absorbent or bibulous member to obtain an extracted sample, wherein the absorbent or bibulous member comprises the one or more extraction internal standards prior to deposition of the blood sample within the delimited zone, and wherein at least one of the one or more extraction internal standards comprises a polypeptide standard; subjecting the extracted sample or a derivative thereof to a proteolytic digestion technique to produce a proteolytically digested sample comprising the proteolytic glycopeptide; introducing at least a portion of the proteolytically digested sample to a liquid chromatography (LC) system of a LC-MS system; and performing the LC-MS analysis on at least the proteolytic glycopeptide and the one or more extraction internal standards.

[0477] In other aspects, provided herein is a method for performing a liquid chromatography-mass spectrometry (LC-MS) analysis of a proteolytic glycopeptide derived from a blood sample from an individual deposited on a delimited zone of an absorbent or bibulous member, the method comprising: obtaining an absorbent or bibulous member comprising a blood sample from the individual deposited thereon, wherein the absorbent or bibulous member comprises one or more extraction internal standards deposited and dried prior to deposition of the blood sample on the absorbent or bibulous member, and wherein the absorbent or bibulous member comprising the blood sample contains at least a portion of the blood sample and the one or more extraction internal standards in an overlapping area of the absorbent or bibulous member; extracting at least a portion of the plurality of polypeptides and the one or more extraction internal standards from the absorbent or bibulous member to obtain an extracted sample; subjecting the extracted sample or a derivative thereof to a proteolytic digestion technique to produce a proteolytically digested sample comprising the proteolytic glycopeptide; introducing at least a portion of the proteolytically digested sample to a liquid chromatography (LC) system of a LC-MS system; and performing an LC-MS analysis to quantify one or more biomarkers of ovarian cancer and the one or more extraction internal standards, and wherein at least one of the one or more biomarkers is a glycopeptide.

[0478] In other aspects, provided herein is an absorbent or bibulous member, such as a blood spot card, comprising one or more extraction internal standard, wherein the one or more extraction internal standards comprises at least one polypeptide standard, and wherein the blood spot card does not comprise a blood sample deposited thereon. In some embodiments, the one or more extraction standards are deposited on the absorbent or bibulous member, such as a blood spot card, in a delimited zone, such as where a blood sample is deposited.

### B3. Example Mass Spectrometry and Sample Preparation Workflow

[0479] For purposes of orientation and illustration of the description herein, provided in this section are example aspects of sample preparation and mass spectrometry workflows (FIGS. 1A-1C) for analyzing the composition of a peptide and/or glycopeptide using a mass spectrometer. Subsequent sections are provided with more details regarding certain inventive features related to methods for proteolytically digesting a biological sample, such as a blood sample, comprising a glycoprotein, methods of performing a LC-MS analysis of a proteolytic glycopeptide, and mass spectrometry workflows involving any combination of elements thereof.

[0480] FIG. 1A is a schematic of an example workflow 100 for a peptide structure analysis, including of glycopeptides. The workflow 100 may include various operations including, for example, sample collection 102 using an absorbent or bibulous member, such as a blood spot card, sample intake 104, sample preparation and mass spectrometry processing 106, and data analysis 108.

[0481] Sample collection 102 may include, for example, obtaining a biological sample, such as a blood sample, 112 from an individual 114. Relevant to the methodology described herein, a biological sample 112 may take the form of a blood sample obtained via one or more sampling methods, such as a finger prick produced using a lancet, and deposited on an absorbent or bibulous member, such as a blood spot card. In some embodiments, many aliquots of the biological sample 112 are obtained 118, such as via deposition of a blood sample from an individual onto a plurality of absorbent or bibulous members or a plurality of blood deposition sites on an absorbent or bibulous member, such as a blood spot card. In some embodiments, the absorbent or bibulous members performs a separation of the blood sample from the individual, such as to produce a serum sample, a plasma sample, and/or extraction of a blood cell (e.g., white blood cell (WBC), red blood cell (RBC) sample. In some embodiments, the biological sample, such as the blood sample, 112 may include nucleotides (e.g., ssDNA, dsDNA, RNA), organelles, amino acids, peptides, proteins, carbohydrates, glycoproteins, or any combination thereof.

[0482] Sample intake 104 may include one or more various operations such as, for example, aliquoting, labeling, registering, processing, storing, thawing, and/or other types of operations involved with preparing a sample for sample preparation and mass spectrometry processing. In some embodiments, sample intake 104 comprises separating one or portions of an absorbent or bibulous member, such as punching one or more chads out of a blood spot card with a hole punching device.

[0483] Sample preparation and mass spectrometry processing 106 may include, for example, one or more operations to form set of peptide structures 122, such as a proteolytic peptide and/or a proteolytic glycopeptide. In some embodiments, the sample preparation comprises extracting one or more polypeptides from an absorbent or bibulous member, such as a blood spot card, or a portion thereof with an extraction buffer. In some embodiments, the extracted polypeptide content is further processed, such as via subjecting to a precipitation technique. In some embodiments, the sample preparation includes subjecting a blood sample, or a portion thereof, to a proteolytic digestion. Mass spectrometry processing 124 may include, for example, liquid chromatography, introducing species from the sample, and/or derived therefrom, to a mass spectrometer, and data acquisition, such as using a multiple reaction monitoring (MRM) technique. MRM is a mass spectrometry method in which a precursor ion of a particular m/z value, including window thereof, (e.g., peptide analyte) is selected in the first quadrupole (Q1) and transmitted to the second quadrupole (Q2) for fragmentation. The resulting product ions are then transmitted to the third quadrupole (Q3), which detects only product ions with selected predefined m/z values. In some embodiments, the predefined m/z value, including window thereof, selected in the first quadrupole and a predefined m/z value, including window thereof, may be expressed as a MRM transition. Dynamic MRM (dMRM) is a variant of MRM. In dynamic MRM mode, MRM transition lists are scheduled throughout an LC/MS run based on the retention time window for each analyte. In this way, analytes are only monitored while they are eluting from the LC and therefore the MS scan time is not wasted by monitoring the analytes when they are not expected.

[0484] Data analysis 108 may include, for example, peptide structure analysis 126, e.g., determining the amino acid sequence of a peptide, determining a site of a post-translational modification, and/or determining a glycan composition and/or structure. In some embodiments, data analysis 108 also includes output generation 110. In some embodiments, output generation 110 may be considered a separate operation from data analysis 108. Output generation 110 may include, for example, generating final output 128 based on the results of peptide structure analysis 126. In some embodiments, the final output 128 may be used for one or more downstream purposes, such as research, diagnosis, and/or treatment, and may be sent to a remote system 130.

[0485] In certain aspects, the workflow 100 may optionally exclude one or more of the operations described herein and/or may optionally include one or more other steps or operations other than those described herein (e.g., in addition to and/or instead of those described herein).

[0486] FIG. 1B is a schematic of an example workflow 200 for certain sample preparation techniques 106, some of which may be optionally used in methods provided herein. In some embodiments, the workflow 200 comprises a denaturation step 202, such as to unfold and/or linearize a polypeptide to expose one or more cleavage sites. In some embodiments, the workflow 200 comprises a reduction step 202, such as to cleave disulfide bonds. In some embodiments, the workflow 200 comprises an alkylation technique 204, such as to modify cysteine residues to prevent reformation of a disulfide bond. In some embodiments, the workflow 200 comprises a protease digestion technique 206, such as to produce proteolytic peptides, including proteolytic glycopeptides. Box 205 can represent the R group of an amino acid such as, for example, an R group of arginine or lysine that typically will direct a tryptic cleavage. In some embodiments, the workflow 200 may comprise a post-digestion procedure 207, such as any of a desalting technique, addition of a standard, aliquoting, and/or preparation for a mass spectrometry analysis.

[0487] FIG. 1C is a schematic of an example workflow for certain mass spectrometry processing techniques 106, some of which may be optionally used in methods provided herein. In some embodiments, the workflow comprises a quantification technique 208 using a mass spectrometer, such as a liquid chromatography-mass spectrometry system. In some embodiments, the workflow comprises a quality control technique 210 configured to optimize data quality. In some embodiments, measures can be put in place allowing only errors within acceptable ranges outside of an expected value. In some embodiments, employing statistical models (e.g., using Westgard rules) can assist in quality control 210. For example, quality control 210 may include, for example, assessing the retention time and abundance of representative peptide structures (e.g., glycosylated and/or aglycosylated) and spiked-in internal standards, in either every sample, or in each quality control sample (e.g., pooled serum digest). In some embodiments, the workflow comprises a peak integration and normalization technique 212 to process the data that has been generated and transform the data into a format for analysis. For example, peak integration and normalization 212 may include converting abundance data for various product ions that were detected for a selected peptide structure into a single quantification metric (e.g., a relative quantity, an adjusted quantity, a normalized quantity, a relative concentration, an adjusted concentration, a normalized concentration, etc.) for that peptide structure. In some embodiments, peak integration and normalization 212 may be performed using one or more of the techniques described in U.S. Patent Publication No. 2020/0372973 A1 and/or US Patent Publication No. 2020/0240996A1, the disclosures of which are incorporated by reference herein in their entireties

### C3. Absorbent or Bibulous Members and Methods of Use Thereof

[0488] Provided herein, in certain aspects, are absorbent or bibulous members, such as a blood spot card or a lateral flow blood sample device, comprising one or more extraction internal standards, wherein at least one of the one or more extraction internal standards is a polypeptide standard. The absorbent or bibulous member and extraction internal standards, including methods associated therewith, are described in more detail below. The modular discussion of these features of the application is not intended to limit the scope of the description provided herein, and one of ordinary skill in the art will readily appreciate that various features can be combined.

### I. Absorbent or Bibulous Members

[0489] The absorbent or bibulous members encompassed herein may take many forms and, in some embodiments, perform one or more blood sample processing functions. Generally speaking, the absorbent or bibulous members described herein serve as a platform to accept a blood sample, or a derivative thereof, from an individual, wherein the blood sample, or the derivative thereof, can dry on or within the absorbent or bibulous member. Subsequently, the absorbent or bibulous member comprising a blood sample can be processed, e.g., shipped to a laboratory or subjected to an extraction technique. The absorbent or bibulous members described herein enhance the stability of analytes at ambient or elevated environmental temperatures (such as by inhibiting enzymatic activity in whole blood) and simplify the transportation of sample by avoiding the need for a cold chain. Blood spot cards are well known in the art, e.g., see U.S. Pat. Nos. 3,838,012; 9,198,609; and 10,422,729, which are hereby incorporated herein by reference in their entirety.

[0490] In some embodiments, the absorbent or bibulous member is a blood spot card. In some embodiments, the blood spot card comprises a porous material or a mesh material on which a blood sample, or portion thereof, is deposited and/or received. In some embodiments, the blood spot card comprises a filter paper material, such as an absorbent filter paper. In some embodiments, the filter paper material comprises a cellulose-based paper. In some embodiments, the filter paper material does not bind polypeptide content in a manner such that said polypeptide content cannot be later extracted from the filter paper material. In some embodiments the filter paper material prevents or reduces sample hemolysis. In some embodiments, the filter paper material is Watman paper. In some embodiments, the blood spot card is a Whatman 903 Proteinsaver card.

[0491] In some embodiments, the absorbent or bibulous member is a blood spot card comprising one or more delimited zones configured to guide placement of a blood sample. Such delimited zones may be any shape or size, and have any placement on the blood spot card. In some embodiments, the delimited zone has a surface area of about 100 mm² to about 1,000 mm², such as about any of 150 mm², 200 mm², 250 mm², 300 mm², 350 mm², 400 mm², 450 mm², 500 mm², 600 mm², 700 mm², 800 mm², or 900 mm². In some embodiments, the delimited zone has a surface area of about 1,000 mm² or less, such as about any of 900 mm² or less, 800 mm² or less, 700 mm² or less, 600 mm² or less, 500 mm² or less, 450 mm² or less, 400 mm² or less, 350 mm² or less, 300 mm² or less, 250 mm² or less, 200 mm² or less, 150 mm² or less, or 100 mm² or less. In some embodiments, the delimited zone forms a circle. In some embodiments, the delimited zone is marked, such as visible to the naked eye, but a line or a portion thereof, such as a dashed line. In some embodiments, the blood spot card comprises one or more additional markings, such as identifying information.

[0492] FIG. 14A provides an example blood spot card 1400 having three delimited zones 1404, 1406, 1408. The blood spot card 1400 comprises a filter paper material 1402. The delimited zones 1404, 1406, 1408 are marked by dashed line circles and direct the placement of a blood sample. The blood spot card 1400 further comprises a marking 1410 for the identification of the sample.

[0493] In some embodiments, the blood spot card is a patterned blood spot card comprising a feature to control the area of the card exposed to a blood sample. In some embodiments, the patterned blood spot card comprises a hydrophobic material, such as a wax, to control the area of the card exposed to a blood sample.

[0494] In some embodiments, the blood spot card further comprises one or more extraction internal standards, wherein at least one of the extraction internal standards comprises a polypeptide standard. The extraction internal standards may be placed in a variety of configurations on the blood spot card such that once the blood sample is applied and allowed to dry, a portion of the blood spot card can be separated, such as by punching a chad from the blood spot card, the portion of the blood spot card comprising at least a portion of the blood sample and the one or more extraction internal standards. In some embodiments, the one or more extraction internal standards are deposited in a delimited zone of the blood spot card such that the one or more extraction internal standards are dried on the blood spot card prior to deposition of a blood sample. In some embodiments, the one or more extraction internal standards are deposited in a substantially uniform manner within the delimited zone. In some embodiments, the one or more extraction internal standards are deposited in a patterned manner within the delimited zone. In some embodiments, the delimited zone of a blood spot card comprises a known concentration of one or more extraction internal standards. In some embodiments, the method described herein comprise determining the total amount of a blood sample component and/or one or more extraction internal standards deposited on an absorbent or bibulous member, such as a blood spot card, based on the size of the one or more chads used to obtain polypeptide content for LC-MS analysis (e.g., a correction factor based on the size of the one or more chads and the size of a delimited area comprising a blood sample (or a portion thereof) and one or more extraction internal standards.

[0495] In some embodiments, the absorbent or bibulous member comprises a lateral flow element useful for performing a blood sample processing step. In some embodiments, the absorbent or bibulous member comprising a lateral flow element comprises (a) a delimited zone for deposition of a blood sample, and (b) a lateral flow element. In some embodiments, the absorbent or bibulous member comprises a zone, such as a delimited zone, wherein the component of the blood sample, such as a plasma or serum sample is obtained and allowed to dry thereon. In some embodiments, the zone comprising the plasma or serum sample is a portion of the lateral flow element.

[0496] FIG. 14B provides an example absorbent or bibulous member comprising a lateral flow element 1450. The absorbent or bibulous member 1400 comprises a delimited zone 1452 for deposition of a blood sample operably connected with a lateral flow zone 1454 configured for separation of one or more components of the blood sample. The absorbent or bibulous member 1450 comprises a zone 1456 wherein the desired separated blood component can be obtained therefrom, e.g., a zone where a plasma or serum sample is dried thereon. The zone 1456 can be distal from and/or spaced apart from the delimited zone 1452. The absorbent or bibulous member 1450 further comprises a marking 1460 for the identification of the sample.

[0497] In some embodiments, the absorbent or bibulous member comprising a lateral flow element further comprises one or more extraction internal standards, wherein at least one of the extraction internal standards comprises a polypeptide standard. The extraction internal standards may be placed in a variety of configurations on the absorbent or bibulous member comprising a lateral flow element such that once the blood sample is applied and allowed to be processed and dry, a portion of the absorbent or bibulous member can be separated, such as by punching a chad from the absorbent or bibulous member, the portion of the absorbent or bibulous member comprising at least a portion of the blood sample and the one or more extraction internal standards. In some embodiments, the one or more extraction internal standards are deposited on a delimited zone configured for deposition of a blood sample. In some embodiments, the one or more extraction internal standards are deposited on a lateral flow element configured for processing a blood sample. In some embodiments, the one or more extraction internal standards are deposited on a zone configured for receipt of a component of a blood sample, such as a plasma or serum sample. Various combinations of the placement of the one or more extraction internal standards are encompassed by the description provided herein. In some embodiments, the absorbent or bibulous member comprising a lateral flow element comprises a plurality of populations of the one or more extraction internal standards, wherein the populations may of the extraction internal standards may be distinguished from one another (e.g., contain different polypeptide standards). In some embodiments, at least one population provides distinct information as compared to another population. For example, in some embodiments, the absorbent or bibulous member comprising a lateral flow element comprises a first population of the one or more extraction internal standards deposited on a delimited zone configured for deposition of a blood sample, wherein such population is useful for assessing sample migration to the zone for receipt of the processed sample. In some embodiments, the absorbent or bibulous member comprises a lateral flow element configured to separate whole blood into a portion of plasma, wherein the whole blood is deposited at the delimited zone and then a liquid portion of the whole blood laterally flows from the delimited zone to a distal zone, wherein the distal zone contains the portion of the plasma.

[0498] In some embodiments, the absorbent or bibulous member, including a single delimited zone of the absorbent or bibulous member, is configured to accept a blood sample having a volume of about 250 μL or less, such as about any of 225 μL or less, 200 μL or less, 175 μL or less, 150 μL or less, 125 μL or less, 100 μL or less, 75 μL or less, 50 μL or less, or 25 μL or less. In some embodiments, the absorbent or bibulous member, including a single delimited zone of the absorbent or bibulous member, is configured to accept a blood sample having a volume of about any of 250 μL, 225 μL, 200 μL, 175 μL, 150 μL, 125 μL, 100 μL, 75 μL, 50 μL, or 25 μL. In some embodiments, the absorbent or bibulous member, including a single delimited zone of the absorbent or bibulous member, is configured to accept a blood sample obtained from lancet of an individual, such as from a finger prick or a heel prick. In some embodiments, the absorbent or bibulous member comprises 1 to 10 delimited zoned configured for deposition of a blood sample. In some embodiments, the absorbent or bibulous member comprises 1 to 10 delimited zoned configured for deposition of a blood sample, wherein each delimited zone is configured to accept a blood sample having a volume of about 250 μL or less.

### II. Extraction Internal Standards and Uses Thereof

[0499] In certain aspects, provided herein are extraction internal standards suitable for use with the absorbent or bibulous members, such as a blood spot card, and methodology described herein. In some embodiments, provided is one or more extraction internal standards, wherein at least one of the one or more extraction internal standards comprises a polypeptide standard. In some embodiments, all of the one or more extraction internal standards are polypeptide standards. In some embodiments, a single extraction internal standard is used in the compositions and methods described herein, wherein the extraction internal standard is a polypeptide standard. In some embodiments, a plurality of extraction internal standards are used in the compositions and methods described herein, wherein at least one of the extraction internal standards is a polypeptide standard. As described herein, the polypeptide standards have a known composition, known amount, and known location on the absorbent or bibulous member (e.g., prior to deposition of a blood sample) such that the polypeptide standard serves as a reference point for one or more processes involved with analyzing the components of the blood sample using an LC-MS technique. In some embodiments, the polypeptide standard having a known location will move, such as due to placement of a blood sample on an absorbent or bibulous member. For example, as described in more detail herein, in the some embodiments, the polypeptide standard is useful for determining one or more of an extraction efficiency, a digestion efficiency, a sample migration pattern, or quantification of a polypeptide.

[0500] In some embodiments, the one or more extraction internal standards comprise a plurality of polypeptide standards, wherein at least two polypeptide standards of the plurality have different amino acid lengths. In some embodiments, the at least two polypeptide standards of the plurality are different in length by 1 or more amino acid, such as any of 5 or more, 10 or more, 20 or more, 30 or more, 40 or more, 50 or more, 60 or more, 70 or more, 80 or more, 90 or more, 100 or more, 150 or more, 200 or more, 250 or more, 300 or more, 400 or more, 500 or more, 600 or more, 700 or more, 800 or more, 900 or more, 1000 or more, 1100 or more, 1200 or more, 1300 or more, 1400 or more, 15000 or more, 1600 or more, 1700 or more, 1800 or more, 1900 or more, or 2000 or more amino acids. In some embodiments, the at least two polypeptide standards of the plurality are different in length by about any of 1, 5, 10, 20, 30, 40, 50, 60, 70, 80, 90, 100, 150, 200, 250, 300, 400, 500, 600, 700, 800, 900, 1000, 1100, 1200, 1300, 1400, 15000, 1600, 1700, 1800, 1900, or 2000 amino acids.

[0501] In some embodiments, the polypeptide standard has an amino acid length of at least about 4 amino acids to about 200 amino acids, such as any of about 5 amino acids to about 1900 amino acids, about 10 amino acids to about 1800 amino acids, about 20 amino acids to about 1700 amino acids, about 30 amino acids to about 1600 amino acids, about 40 amino acids to about 1500 amino acids, about 50 amino acids to about 1400 amino acids, about 60 amino acids to about 1300 amino acids, about 70 amino acids to about 1200 amino acids, about 80 amino acids to about 1100 amino acids, about 90 amino acids to about 1000 amino acids, about 100 amino acids to about 900 amino acids, about 200 amino acids to about 800 amino acids, about 300 amino acids to about 700 amino acids, about 400 amino acids to about 600 amino acids, or about 500 amino acids to about 750 amino acids. In some embodiments, the polypeptide standard has an amino acid length of at least about 4 amino acids, such as at least about any of 10 amino acids, 20 amino acids, 30 amino acids, 40 amino acids, 50 amino acids, 75 amino acids, 100 amino acids, 150 amino acids, 200 amino acids, 250 amino acids, 300 amino acids, 350 amino acids, 400 amino acids, 450 amino acids, 500 amino acids, 550 amino acids, 600 amino acids, 650 amino acids, 700 amino acids, 750 amino acids, 800 amino acids, 850 amino acids, 900 amino acids, 950 amino acids, 1000 amino acids, 1100 amino acids, 1200 amino acids, 1300 amino acids, 1400 amino acids, 1500 amino acids, 1600 amino acids, 1700 amino acids, 1800 amino acids, 1900 amino acids, or 2000 amino acids.

[0502] In some embodiments, at least one polypeptide standard of the one or more extraction internal standards comprises at least one internal enzymatic cleavage site, such as a cleavage site for trypsin or LysC. In some embodiments, the internal enzymatic cleavage site of the at least one polypeptide standard is cleaved during the provided method, resulting in two or more polypeptide fragments, wherein the two or more polypeptide fragments are shorter than the uncleaved polypeptide standard. In some embodiments, the cleaved polypeptide fragments comprise a C-terminal arginine or lysine. In some embodiments, the at least one polypeptide standard comprises a polypeptide comprising a C-terminal arginine or lysine.

[0503] In some embodiments, the one or more extraction internal standards comprise a plurality of polypeptide standards, wherein at least two of the plurality of polypeptide standards have different net hydrophobicities. In some embodiments, the net hydrophobicity is based on a partition coefficient analysis. In some embodiments, the net hydrophobicity is based on an octanol and water partition coefficient. In some embodiments, the net hydrophobicity is based on a computational tool. In some embodiments, the plurality of polypeptide standards having different net hydrophobicities comprises a hydrophobicity range. In some embodiments, the plurality of polypeptide standards comprise a hydrophobicity range as defined by the Grand average of hydropathicity index (GRAVY). In some embodiments, a hydrophobicity range as defined by GRAVY is about −0.5 to about 1. In some embodiments, a hydrophobicity range as defined by GRAVY is about −1 to about 2, about −0.8 to about 1.8, about −0.6 to about 1.6, about −0.4 to about 1.4, about −0.2 to about 1.2, about 0 to about 1, about 0.2 to about 0.8, about 0.4 to about 0.6, or about 0.5 to about 0.9. In some embodiments, a hydrophobicity range as defined by GRAVY is −1 to 2, −0.8 to 1.8, −0.6 to 1.6, −0.4 to 1.4, −0.2 to 1.2, 0 to 1, 0.2 to 0.8, 0.4 to 0.6, or 0.5 to 0.9. In some embodiments, a hydrophobicity range as defined by GRAVY is −0.5 to 1.

[0504] In some embodiments, the at least one polypeptide standard of the one or more extraction internal standards comprises a sequence that is non-homologous to an endogenous polypeptide of an individual from which the blood sample originates. In some embodiments, the at least one polypeptide standard comprises an amino acid sequence that does not have homology to a peptide derived from the human proteome. In some embodiments, the at least one polypeptide standard comprises an amino acid sequence derived from a bacterial, a fungal, an insect, a plant, or a non-human animal proteome. In some embodiments, the at least one polypeptide standard comprises an amino acid sequence of unknown origin (e.g., a sequence not found in known organisms or exogenous).

[0505] In some embodiments, the at least one polypeptide standard of the one or more extraction internal standards is a synthetic polypeptide. In some embodiments, the synthetic peptide is one or more of SEQ ID NOS: 21 and 22. In some embodiments, the at least one polypeptide standard comprises a sequence that is an analog of an endogenous polypeptide of an individual from which the blood sample originates. In some embodiments, the at least one polypeptide standard comprises an unnatural amino acid. In some embodiments, the unnatural amino acid comprises a fluorescent moiety, a functional moiety, and/or a reactive moiety.

[0506] In some embodiments, the at least one polypeptide standard of the one or more extraction internal standards is a synthetic polypeptide, wherein the at least one polypeptide standard comprises a stable heavy isotope label. In some embodiments, the stable heavy isotope label of the at least one polypeptide standard comprises one or more heavy labeled arginine, lysine, leucine, valine, or a combination thereof. In some embodiments, the stable heavy isotope label of the at least one polypeptide standard comprises 2-plex labeling, 3-plex labeling, or higher multiplex labeling. In some embodiments, the stable heavy isotope label of the at least one polypeptide standard is produced using stable isotope labeling by amino acids in cell culture (SILAC). In some embodiments, the analog of the endogenous polypeptide is a stable heavy isotope labeled analog polypeptide. In some embodiments, the non-homologous polypeptide is a stable heavy isotope labeled non-homologous polypeptide. In some embodiments, the non-human polypeptide is a stable heavy isotope labeled non-human polypeptide.

[0507] In some embodiments, the at least one polypeptide standard of the one or more extraction internal standards is a recombinantly expressed polypeptide. In some embodiments, the recombinantly expressed polypeptide comprises an amino acid sequence range from about 4 amino acids to about 2000 amino acids, about 5 amino acids to about 1900 amino acids, about 10 amino acids to about 1800 amino acids, about 20 amino acids to about 1700 amino acids, about 30 amino acids to about 1600 amino acids, about 40 amino acids to about 1500 amino acids, about 50 amino acids to about 1400 amino acids, about 60 amino acids to about 1300 amino acids, about 70 amino acids to about 1200 amino acids, about 80 amino acids to about 1100 amino acids, about 90 amino acids to about 1000 amino acids, about 100 amino acids to about 900 amino acids, about 200 amino acids to about 800 amino acids, about 300 amino acids to about 700 amino acids, about 400 amino acids to about 600 amino acids, or about 500 amino acids to about 750 amino acids. In some embodiments, the recombinantly expressed polypeptide comprises at least one internal enzymatic cleavage site. In some embodiments, the recombinantly expressed polypeptide of the one or more extraction internal standards have different net hydrophobicities. In some embodiments, the recombinantly expressed polypeptide comprises a sequence that is non-homologous to an endogenous polypeptide of an individual from which the blood sample originates. In some embodiments, the recombinantly expressed polypeptide comprises a sequence that does not have homology to a peptide derived from the human proteome. In some embodiments, the recombinantly expressed polypeptide comprises an analog sequence, wherein one or more amino acids are unnatural or derivatives of the endogenous sequence. In some embodiments, the recombinantly expressed polypeptide is a synthetic polypeptide. In some embodiments, the recombinantly expressed polypeptide comprises a stable heavy isotope label.

[0508] In some embodiments, the at least one polypeptide standard of the one or more extraction internal standards is a glycopolypeptide. In some embodiments, the glycopolypeptide comprises an amino acid sequence range from about 4 amino acids to about 2000 amino acids, about 5 amino acids to about 1900 amino acids, about 10 amino acids to about 1800 amino acids, about 20 amino acids to about 1700 amino acids, about 30 amino acids to about 1600 amino acids, about 40 amino acids to about 1500 amino acids, about 50 amino acids to about 1400 amino acids, about 60 amino acids to about 1300 amino acids, about 70 amino acids to about 1200 amino acids, about 80 amino acids to about 1100 amino acids, about 90 amino acids to about 1000 amino acids, about 100 amino acids to about 900 amino acids, about 200 amino acids to about 800 amino acids, about 300 amino acids to about 700 amino acids, about 400 amino acids to about 600 amino acids, or about 500 amino acids to about 750 amino acids. In some embodiments, the glycopolypeptide comprises at least one internal enzymatic cleavage site. In some embodiments, the glycopolypeptide of the one or more extraction internal standards have different net hydrophobicities. In some embodiments, the glycopolypeptide comprises a sequence that is non-homologous to an endogenous polypeptide of an individual from which the blood sample originates. In some embodiments, the glycopolypeptide comprises a sequence that does not have homology to a peptide derived from the human proteome. In some embodiments, the glycopolypeptide comprises an analog sequence, wherein one or more amino acids are unnatural or derivatives of the endogenous sequence. In some embodiments, the glycopolypeptide is a synthetic polypeptide. In some embodiments, the glycopolypeptide comprises a stable heavy isotope label.

[0509] In some embodiments, the at least one polypeptide standard of the one or more extraction internal standards is a polypeptide that does not substantially interact with hemoglobin. In some embodiments, hemoglobin does not substantially impact the extraction of the polypeptide. In some embodiments, hemoglobin does not substantially impact the processing of the polypeptide. In some embodiments, hemoglobin does not substantially impact the digestion of the polypeptide. I

[0510] In some embodiments, the at least one polypeptide standard of the one or more extraction internal standards comprises a contiguous sequence from SEQ ID NOS: 14-20 as shown in Table 7. In some embodiments, the at least one polypeptide standard of the one or more extraction internal standards comprises at least a contiguous 4 amino acid sequence from SEQ ID NOS: 14-20. In some embodiments, the at least one polypeptide standard of the one or more extraction internal standards comprises at least a contiguous sequence of about 4, about 5, about 6, about 7, about 8, about 9, about 10, about 11, about 12, about 13, about 14, about 15, about 16, about 17, about 18, about 19, about 20, about 30, about 40, about 50, about 60, about 70, about 80, about 90, or about 100 acids from SEQ ID NOS: 14-20. In some embodiments, the at least one polypeptide standard of the one or more extraction internal standards comprises one or more polypeptides human apolipoprotein C-III (APOC3) of SEQ ID NO: 14, human alpha-2-macroglobulin (A2MG) of SEQ ID NO: 15, human ceruloplasmin (CERU) of SEQ ID NO: 16, human alpha-1-acid glycoprotein 1 (AGP1) of SEQ ID NO: 17, human haptoglobin (HPT) of SEQ ID NO: 18, human hemopexin (HEMO) of SEQ ID NO: 19, or human beta-2-glycoprotein 1 (APOH) of SEQ ID NO: 20. In some embodiments, the at least one polypeptide standard of the one or more extraction internal standards is APOC3, for example SEQ ID NO: 14. In some embodiments, the at least one polypeptide standard of the one or more extraction internal standards is A2MG, for example SEQ ID NO: 15. In some embodiments, the at least one polypeptide standard of the one or more extraction internal standards is CERU, for example SEQ ID NO: 16. In some embodiments, the at least one polypeptide standard of the one or more extraction internal standards is AGP1, for example SEQ ID NO: 17. In some embodiments, the at least one polypeptide standard of the one or more extraction internal standards is HPT, for example SEQ ID NO: 18. In some embodiments, the at least one polypeptide standard of the one or more extraction internal standards is HEMO, for example SEQ ID NO: 19. In some embodiments, the at least one polypeptide standard of the one or more extraction internal standards is APOH, for example SEQ ID NO: 20. In some embodiments, the at least one polypeptide standard of the one or more extraction internal standards has at least 85%, at least 90%, at least 95%, at least 96%, at least 97%, at least 98%, or at least 99% sequence identity to one or more of SEQ ID NOS: 14-20. In some embodiments, the at least one polypeptide standard of the one or more extraction internal standards has 85%, 86%, 87%, 88%, 89%, 90%, 91%, 92%, 93%, 94%, 95%, 96%, 97%, 98%, or 99% sequence identity to one or more of SEQ ID NOS: 14-20. In some embodiments, the at least one polypeptide standard of the one or more extraction internal standards is any of the polypeptides described herein, wherein the polypeptide further comprises one or more of an amino acid sequence range from about 4 amino acids to about 2000 amino acids, at least one internal enzymatic cleavage site, a unique net hydrophobicity, a sequence that is non-homologous to an endogenous polypeptide of an individual from which the blood sample originates, a sequence that does not have homology to a peptide derived from the human proteome, an analog sequence, wherein one or more amino acids are unnatural or derivatives of the endogenous sequence, a stable heavy isotope label, a polypeptide that does not substantially interact with hemoglobin, a recombinantly expressed polypeptide, or a glycopolypeptide. In an embodiment, the proteins of SEQ ID NOS: 14-20 are heavy labeled proteins where all arginines and lysines are replaced with stable isotope labeled lysine and arginine. The proteins are labeled with a stable isotopes so that they can be monitored without confusing them for the endogenous proteins in the blood sample. Such heavy labeled glycoproteins could be produced through recombinant expression in an orthologous system, cultured in SILAC supplemented media. In an embodiment, the proteins of SEQ ID NOS: 14-20 have all of their lysines and arginines heavy isotope labeled and deposited on a filter card. When blood is applied, a portion of the labeled proteins of SEQ ID NOS: 14-20 is extracted from the filter paper or DBS and then digested with a proteolytic enzyme. A resulting peptide produced from the enzymatic digestion having the isotope label from each of the proteins of SEQ ID NOS: 14-20 can be monitored with multiple reaction monitoring (MRM) for determining the extraction efficiency and/or tryptic efficiency for each of the labeled proteins. The labeled isotope allows the trypic peptides generated from the proteins of SEQ ID NOS: 14-20 to be distinguished from naturally occurring tryptic peptides. In an embodiment, peptides of SEQ ID NOS: 21 and 22 can represent an exogenous or non-human peptide not normally found in human subjects and be deposited on a filter paper or DBS as shown in Table 7. Since SEQ ID NOS: 21 and 22 are not normally found in human subjects, they can be used for determining the extraction efficiency.

TABLE 7
Sources of example polypeptide standards.

| SEQ | | |
|---|---|---|
| ID | | |
| NO: | Sequence | Origin |
| 114 | MQPRVLLVVALLALLASARASEAEDASLLSFMQGY | Human |
| | MKHATKTAKDALSSVQESQVAQQARGWVTDGFSSL | Apolipoprotein |
| | KDYWSTVKDKFSEFWDLDPEVRPTSAVAA | C-III |
| | | (APOC3) |
| 215 | MGKNKLLHPSLVLLLLVLLPTDASVSGKPQYMVLV | Human |
| | PSLLHTETTEKGCVLLSYLNETVTVSASLESVRGN | Alpha-2- |
| | RSLFTDLEAENDVLHCVAFAVPKSSSNEEVMFLTV | macroglobulin |
| | QVKGPTQEFKKRTTVMVKNEDSLVFVQTDKSIYKP | (A2MG) |
| | GQTVKFRVVSMDENFHPLNELIPLVYIQDPKGNRI | |
| | AQWQSFQLEGGLKQFSFPLSSEPFQGSYKVVVQKK | |
| | SGGRTEHPFTVEEFVLPKFEVQVTVPKIITILEEE | |
| | MNVSVCGLYTYGKPVPGHVTVSICRKYSDASDCHG | |
| | EDSQAFCEKFSGQLNSHGCFYQQVKTKVFQLKRKE | |
| | YEMKLHTEAQIQEEGTVVELTGRQSSEITRTITKL | |
| | SFVKVDSHFRQGIPFFGQVRLVDGKGVPIPNKVIF | |
| | IRGNEANYYSNATTDEHGLVQFSINTTNVMGTSLT | |
| | VRVNYKDRSPCYGYQWVSEEHEEAHHTAYLVFSPS | |
| | KSFVHLEPMSHELPCGHTQTVQAHYILNGGTLLGL | |
| | KKLSFYYLIMAKGGIVRTGTHGLLVKQEDMKGHFS | |
| | ISIPVKSDIAPVARLLIYAVLPTGDVIGDSAKYDV | |
| | ENCLANKVDLSFSPSQSLPASHAHLRVTAAPQSVC | |
| | ALRAVDQSVLLMKPDAELSASSVYNLLPEKDLTGF | |
| | PGPLNDQDNEDCINRHNVYINGITYTPVSSTNEKD | |
| | MYSFLEDMGLKAFTNSKIRKPKMCPQLQQYEMHGP | |
| | EGLRVGFYESDVMGRGHARLVHVEEPHTETVRKYF | |
| | PETWIWDLVVVNSAGVAEVGVTVPDTITEWKAGAF | |
| | CLSEDAGLGISSTASLRAFQPFFVELTMPYSVIRG | |
| | EAFTLKATVLNYLPKCIRVSVQLEASPAFLAVPVE | |
| | KEQAPHCICANGRQTVSWAVTPKSLGNVNFTVSAE | |
| | ALESQELCGTEVPSVPEHGRKDTVIKPLLVEPEGL | |
| | EKETTFNSLLCPSGGEVSEELSLKLPPNVVEESAR | |
| | ASVSVLGDILGSAMQNTQNLLQMPYGCGEQNMVLF | |
| | APNIYVLDYLNETQQLTPEIKSKAIGYLNTGYQRQ | |
| | LNYKHYDGSYSTFGERYGRNQGNTWLTAFVLKTFA | |
| | QARAYIFIDEAHITQALIWLSQRQKDNGCFRSSGS | |
| | LLNNAIKGGVEDEVTLSAYITIALLEIPLTVTHPV | |
| | VRNALFCLESAWKTAQEGDHGSHVYTKALLAYAFA | |
| | LAGNQDKRKEVLKSLNEEAVKKDNSVHWERPQKPK | |
| | APVGHFYEPQAPSAEVEMTSYVLLAYLTAQPAPTS | |
| | EDLTSATNIVKWITKQQNAQGGFSSTQDTVVALHA | |
| | LSKYGAATFTRTGKAAQVTIQSSGTFSSKFQVDNN | |
| | NRLLLQQVSLPELPGEYSMKVTGEGCVYLQTSLKY | |
| | NILPEKEEFPFALGVQTLPQTCDEPKAHTSFQISL | |
| | SVSYTGSRSASNMAIVDVKMVSGFIPLKPTVKMLE | |
| | RSNHVSRTEVSSNHVLIYLDKVSNQTLSLFFTVLQ | |
| | DVPVRDLKPAIVKVYDYYETDEFAIAEYNAPCSKD | |
| | LGNA | |
| 316 | MKILILGIFLFLCSTPAWAKEKHYYIGIIETTWDY | Human |
| | ASDHGEKKLISVDTEHSNIYLQNGPDRIGRLYKKA | ceruloplasmin |
| | LYLQYTDETFRTTIEKPVWLGFLGPIIKAETGDKV | (CERU) |
| | YVHLKNLASRPYTFHSHGITYYKEHEGAIYPDNTT | |
| | DFQRADDKVYPGEQYTYMLLATEEQSPGEGDGNCV | |
| | TRIYHSHIDAPKDIASGLIGPLIICKKDSLDKEKE | |
| | KHIDREFVVMFSVVDENFSWYLEDNIKTYCSEPEK | |
| | VDKDNEDFQESNRMYSVNGYTFGSLPGLSMCAEDR | |
| | VKWYLFGMGNEVDVHAAFFHGQALTNKNYRIDTIN | |
| | LFPATLFDAYMVAQNPGEWMLSCQNLNHLKAGLQA | |
| | FFQVQECNKSSSKDNIRGKHVRHYYIAAEEIIWNY | |
| | APSGIDIFTKENLTAPGSDSAVFFEQGTTRIGGSY | |
| | KKLVYREYTDASFTNRKERGPEEEHLGILGPVIWA | |
| | EVGDTIRVTFHNKGAYPLSIEPIGVRFNKNNEGTY | |
| | YSPNYNPQSRSVPPSASHVAPTETFTYEWTVPKEV | |
| | GPTNADPVCLAKMYYSAVDPTKDIFTGLIGPMKIC | |
| | KKGSLHANGRQKDVDKEFYLFPTVFDENESLLLED | |
| | NIRMFTTAPDQVDKEDEDFQESNKMHSMNGFMYGN | |
| | QPGLTMCKGDSVVWYLFSAGNEADVHGIYFSGNTY | |
| | LWRGERRDTANLFPQTSLTLHMWPDTEGTFNVECL | |
| | TTDHYTGGMKQKYTVNQCRRQSEDSTFYLGERTYY | |
| | IAAVEVEWDYSPQREWEKELHHLQEQNVSNAFLDK | |
| | GEFYIGSKYKKVVYRQYTDSTFRVPVERKAEEEHL | |
| | GILGPQLHADVGDKVKIIFKNMATRPYSIHAHGVQ | |
| | TESSTVTPTLPGETLTYVWKIPERSGAGTEDSACI | |
| | PWAYYSTVDQVKDLYSGLIGPLIVCRRPYLKVFNP | |
| | RRKLEFALLFLVFDENESWYLDDNIKTYSDHPEKV | |
| | NKDDEEFIESNKMHAINGRMFGNLQGLTMHVGDEV | |
| | NWYLMGMGNEIDLHTVHFHGHSFQYKHRGVYSSDV | |
| | FDIFPGTYQTLEMFPRTPGIWLLHCHVTDHIHAGM | |
| | ETTYTVLQNEDTKSG | |
| 174 | MALSWVLTVLSLLPLLEAQIPLCANLVPVPITNAT | Human |
| | LDQITGKWFYIASAFRNEEYNKSVQEIQATFFYFT | Alpha-1- |
| | PNKTEDTIFLREYQTRQDQCIYNTTYLNVQRENGT | acid |
| | ISRYVGGQEHFAHLLILRDTKTYMLAFDVNDEKNW | glycoprotein 1 |
| | GLSVYADKPETTKEQLGEFYEALDCLRIPKSDVVY | (AGP1) |
| | TDWKKDKCEPLEKQHEKERKQEEGES | |
| 185 | MSALGAVIALLLWGQLFAVDSGNDVTDIADDGCPK | Human |
| | PPEIAHGYVEHSVRYQCKNYYKLRTEGDGVYTLND | Haptoglobin |
| | KKQWINKAVGDKLPECEADDGCPKPPEIAHGYVEH | (HPT) |
| | SVRYQCKNYYKLRTEGDGVYTLNNEKQWINKAVGD | |
| | KLPECEAVCGKPKNPANPVQRILGGHLDAKGSFPW | |
| | QAKMVSHHNLTTGATLINEQWLLTTAKNLFLNHSE | |
| | NATAKDIAPTLTLYVGKKQLVEIEKVVLHPNYSQV | |
| | DIGLIKLKQKVSVNERVMPICLPSKDYAEVGRVGY | |
| | VSGWGRNANFKFTDHLKYVMLPVADQDQCIRHYEG | |
| | STVPEKKTPKSPVGVQPILNEHTFCAGMSKYQEDT | |
| | CYGDAGSAFAVHDLEEDTWYATGILSFDKSCAVAE | |
| | YGVYVKVTSIQDWVQKTIAEN | |
| 196 | MARVLGAPVALGLWSLCWSLAIATPLPPTSAHGNV | Human |
| | AEGETKPDPDVTERCSDGWSFDATTLDDNGTMLFF | Hemopexin |
| | KGEFVWKSHKWDRELISERWKNFPSPVDAAFRQGH | (HEMO) |
| | NSVFLIKGDKVWVYPPEKKEKGYPKLLQDEFPGIP | |
| | SPLDAAVECHRGECQAEGVLFFQGDREWFWDLATG | |
| | TMKERSWPAVGNCSSALRWLGRYYCFQGNQFLRFD | |
| | PVRGEVPPRYPRDVRDYFMPCPGRGHGHRNGTGHG | |
| | NSTHHGPEYMRCSPHLVLSALTSDNHGATYAFSGT | |
| | HYWRLDTSRDGWHSWPIAHQWPQGPSAVDAAFSWE | |
| | EKLYLVQGTQVYVFLTKGGYTLVSGYPKRLEKEVG | |
| | TPHGIILDSVDAAFICPGSSRLHIMAGRRLWWLDL | |
| | KSGAQATWTELPWPHEKVDGALCMEKSLGPNSCSA | |
| | NGPGLYLIHGPNLYCYSDVEKLNAAKALPQPQNVT | |
| | SLLGCTH | |
| 207 | MISPVLILFSSFLCHVAIAGRTCPKPDDLPFSTVV | Human |
| | PLKTFYEPGEEITYSCKPGYVSRGGMRKFICPLTG | Beta-2- |
| | LWPINTLKCTPRVCPFAGILENGAVRYTTFEYPNT | glycoprotein 1 |
| | ISFSCNTGFYLNGADSAKCTEEGKWSPELPVCAPI | (APOH) |
| | ICPPPSIPTFATLRVYKPSAGNNSLYRDTAVFECL | |
| | PQHAMFGNDTITCTTHGNWTKLPECREVKCPFPSR | |
| | PDNGFVNYPAKPTLYYKDKATFGCHDGYSLDGPEE | |
| | IECTKLGNWSAMPSCKASCKVPVKKATVVYQGERV | |
| | KIQEKFKNGMLHGDKVSFFCKNKEKKCSYTEDAQC | |
| | IDGTIEVPKCFKEHSSLAFWKTDASDVKPC | |
| 218 | RPAIAINNPYVPR | |
| 229 | FFVAPFPEVFGK | |

[0511] In some embodiments, the at least one polypeptide standard of the one or more extraction internal standards is present in a known amount on the absorbent or bibulous member, such as a blood spot card. In some embodiments, the at least one polypeptide standard is present in a known amount on the absorbent or bibulous member, such as a blood spot card, prior to contact the absorbent or bibulous member with a blood sample. In some embodiments, the known amount of each of the one or more extraction internal standards, such as a polypeptide standard, is about 0.05 ppm to about 5 ppm. In some embodiments, the known amount of each of the one or more extraction internal standards, such as a polypeptide standard, is about 0.02 ppm to about 10 ppm, about 0.05 ppm to about 9 ppm, about 0.1 ppm to about 9 ppm, about 0.2 ppm to about 8 ppm, about 0.3 ppm to about 7 ppm, about 0.4 ppm to about 6 ppm, about 0.5 ppm to about 5 ppm, about 0.6 ppm to about 4 ppm, about 0.7 ppm to about 3 ppm, about 0.8 ppm to about 2 ppm, or about 0.9 ppm to about 1 ppm.

[0512] In some embodiments, the one or more extraction internal standards are deposited and dried on the absorbent or bibulous member, such as a blood spot card, within an area having a surface area of about 1,000 mm² or less. In some embodiments, the area for depositing the one or more extraction internal standards, such as a polypeptide standard, has a surface area of about 1,000 mm² or less, about 950 mm² or less, about 900 mm² or less, about 850 mm² or less, about 800 mm² or less, about 750 mm² or less, about 700 mm² or less, about 650 mm² or less, about 600 mm² or less, about 550 mm² or less, about 500 mm² or less, about 450 mm² or less, about 400 mm² or less, about 350 mm² or less, about 300 mm² or less, about 250 mm² or less, about 200 mm² or less, about 150 mm² or less, about 100 mm² or less, or about 50 mm² or less. In some embodiments, the area for depositing the one or more extraction internal standards, such as a polypeptide standard, has a surface area of 1,000 mm² or less, 950 mm² or less, 900 mm² or less, 850 mm² or less, 800 mm² or less, 750 mm² or less, 700 mm² or less, 650 mm² or less, 600 mm² or less, 550 mm² or less, 500 mm² or less, 450 mm² or less, 400 mm² or less, 350 mm² or less, 300 mm² or less, 250 mm² or less, 200 mm² or less, 150 mm² or less, 100 mm² or less, or 50 mm² or less. In some embodiments, the less can represent the lower limit of a range for surface area as described above where the lower limit is about 2 mm², 4 mm², 6 mm², 8 mm², or 10 mm².

[0513] In some embodiments, the one or more extraction internal standard, such as a polypeptide standard, are deposited and dried on the absorbent or bibulous member, such as a blood spot card, within the delimited zone. In some embodiments, the delimited zone for depositing and drying the one or more extraction internal standard is a defined area, such as marked by a visible line or dash. In some embodiments, the delimited zone is about 1,000 mm² or less. In some embodiments, the delimited zone is any size described herein. In some embodiments, the delimited zone contains a known amount of each of the one or more extraction internal standards, such as a polypeptide standard. In some embodiments, the delimited zone contains about 0.05 ppm to about 5 ppm of each of the one or more extraction internal standards.

III. Methods Associated with the Absorbent or Bibulous Members Described Herein

[0514] In certain aspects, provided herein are methods associated with the absorbent or bibulous members described herein, including absorbent or bibulous members comprising one or more extraction internal standards, wherein at least one of the extraction internal standards is a polypeptide standard.

[0515] In some embodiments, provided is a method of making an absorbent or bibulous member described herein, such as a blood spot card, comprising one or more extraction internal standards, wherein at least one of the extraction internal standards is a polypeptide standard, the method comprising depositing the one or more extraction internal standards on the absorbent or bibulous member. In some embodiments, the method comprises drying the one or more extraction internal standards following deposition on the absorbent or bibulous member.

[0516] In some embodiments, provided is a method for obtaining an absorbent or bibulous member, such as a blood spot card, comprising a blood sample deposited thereon, the method comprising providing the absorbent or bibulous member comprising one or more extraction internal standards, wherein at least one of the extraction internal standards is a polypeptide standard, and providing instructions for the deposition of the blood sample onto the absorbent or bibulous member. In some embodiments, the method comprises depositing the blood sample onto the absorbent or bibulous member. In some embodiments, the method comprises mailing, such as via standard mail with a government regulated mail carrier, e.g., The United States Postal Service, the absorbent or bibulous member comprising the blood sample and the one or more extraction internal standards.

[0517] In some embodiments, provided is a method of extracting at least a portion of a plurality of polypeptides and one or more extraction internal standards, wherein the one or more extraction internal standards comprises a polypeptide standard, from an absorbent or bibulous member, such as a blood spot card. In some embodiments, the method comprises: separating one or more portions of the blood spot card from the blood spot card, wherein the one or more portions of the absorbent or bibulous member comprise at least a portion of the blood sample and the one or more extraction internal standards; extracting at least the portion of the plurality of polypeptides and the one or more extraction internal standards from the one or more portions of the absorbent or bibulous member into an extraction solution; and precipitating at least the portion of the plurality of polypeptides and the one or more extraction internal standards to obtain the extracted sample. In some embodiments, the separating the one or more portions of the absorbent or bibulous member comprises punching the one or more portion of the absorbent or bibulous member using a punching device. In some embodiments, the separated portion of the absorbent or bibulous member is referred to as a chad. In some embodiments, the extracting may include a thermal denaturation step and as water bath sonication in order to mix and promote diffusion of glycoproteins out of absorbent or bibulous member and into the extraction solution. The extraction solution may include buffer such as 50 mM ammonium bicarbonate, and a reducing agent such as 25 mM DTT to help promote denaturation and extraction of the proteins.

[0518] In some embodiments, each of the one or more portions separated from the absorbent or bibulous member have a surface area of about 2 mm² to about 100 mm². In some embodiments, each of the one or more portions separated from the absorbent or bibulous member have a surface area of about any of 1 mm², 2 mm², 3 mm², 4 mm², 5 mm², 6 mm², 7 mm², 8 mm², 9 mm², 10 mm², 15 mm², 20 mm², 25 mm², 30 mm², 35 mm², 40 mm², 45 mm², 50 mm², 55 mm², 60 mm², 65 mm², 70 mm², 75 mm², 80 mm², 85 mm², 90 mm², 95 mm², or 100 mm².

[0519] In some embodiments, the precipitating at least the portion of the plurality of polypeptides and the one or more extraction internal standards comprises subjecting the at least the portion of the plurality of polypeptides and the one or more extraction internal standards to an organic solvent, such as ethanol.

[0520] In some embodiments, the method further comprises adding a solution, such as a buffer, e.g., ammonium bicarbonate, to the extracted sample to resolubilize polypeptide content therein prior to subjecting the extracted sample or the derivative thereof to the proteolytic digestion technique.

[0521] In some embodiments, provided herein is a method for performing a liquid chromatography-mass spectrometry (LC-MS) analysis of a proteolytic glycopeptide derived from a blood sample deposited on a delimited zone of an absorbent or bibulous member, such as a blood spot card, wherein the blood sample comprises a plurality of polypeptides comprising at least one glycoprotein, the method comprising: extracting at least a portion of the plurality of polypeptides and one or more extraction internal standards from the absorbent or bibulous member to obtain an extracted sample, wherein the absorbent or bibulous member comprises the one or more extraction internal standards prior to deposition of the blood sample within the delimited zone, and wherein at least one of the one or more extraction internal standards comprises a polypeptide standard; subjecting the extracted sample or a derivative thereof to a proteolytic digestion technique to produce a proteolytically digested sample comprising the proteolytic glycopeptide; introducing at least a portion of the proteolytically digested sample to a liquid chromatography (LC) system of a LC-MS system; and performing the LC-MS analysis on at least the proteolytic glycopeptide and the one or more extraction internal standards.

[0522] In some embodiments, the performing the LC-MS analysis comprises measuring an abundance signal for the proteolytic glycopeptide and an abundance signal for the one or more extraction internal standards. In some embodiments, the performing the LC-MS analysis further comprises calculating a concentration of the proteolytic glycopeptide based on a concentration of the one or more extraction internal standards prior to deposition on the absorbent or bibulous member, such as a blood spot card, the abundance signal for the proteolytic glycopeptide, and the abundance signal for the one or more extraction internal standards.

[0523] In some embodiments, the method further comprises determining an extraction efficiency based on the LC-MS analysis of at least one of the one or more extraction internal standards. For example, in some embodiments, the extraction efficiency is based on an abundance signal for the one or more extraction internal standards as compared to a reference, such as a known amount of the one or more extraction internal standards deposited on the absorbent or bibulous member and/or comparison of two or more of the extraction internal standards.

[0524] In some embodiments, the method further comprises determining a digestion efficiency based on the LC-MS analysis of at least one of the one or more extraction internal standards. For example, in some embodiments, the digestion efficiency is based on an abundance signal for the one or more extraction internal standards, such as depletion of an abundance signal of a polypeptide standard comprising a protease cleavage site, and/or an increase in an abundance signal for one or more portions of a polypeptide standard, wherein the one or more portions of the polypeptide standard are a result of protease activity.

[0525] In some embodiments, the method further comprises assessing a sample migration pattern based on the LC-MS analysis of at least one of the one or more extraction internal standards. For example, in some embodiments, the sample migration pattern is based on an abundance signal for the one or more extraction internal standards obtained from a delimited zone of an absorbent or bibulous member, wherein the one or more extraction internal standards have known location prior to deposition of a blood sample on the absorbent or bibulous member. In some embodiments, the known location of the one or more extraction internal standards is within the delimited zone and the sample migration pattern provides information regarding the movement of the one or more extraction internal standards upon deposition of a blood sample. In some embodiments, the known location of the one or more extraction internal standards is outside of the delimited zone and the sample migration pattern provides information regarding the movement of the one or more extraction internal standards to the delimited zone upon deposition of a blood sample. In some embodiments, the movement of the one or more extraction internal standards provides information regarding the movement of a blood sample, or a component thereof, after being deposited onto an absorbent or bibulous member.

### D3. Methods for Proteolytically Digesting a Blood Sample Comprising a Glycoprotein

[0526] In certain aspects, provided herein are methods of proteolytically digesting a biological sample, such as an extract from a dried blood sample, comprising a glycoprotein. A dried blood spot sample can be punched to separate one or more discs which are then soaked in a buffer containing DTT at an elevated temperature of 95° C. and sonicated to extract the proteins and glycoproteins. In some embodiments, the extract can be in the form of a precipitate after the addition of ethanol. In some embodiments, the methods comprising subjecting the extract from the dried blood sample, or a portion thereof, to another thermal denaturation technique. Proteases are enzymes that cleave polypeptides at, generally, specific cleavage motifs. For example, trypsin is a serine protease that generally cleaves polypeptides at the carboxyl side (C-terminal side) of lysine and arginine residues. A glycan of a glycopeptide may present a steric hindrance to a protease, thereby inhibiting complete protease digestion of the extract from the dried blood sample, or a portion thereof, comprising a glycoprotein. Without being bound to this theory, it is believed that the methods taught herein improve polypeptide unfolding, such as linearization, and provide protease access to cleavage sites thereby providing methods for more complete proteolytic digestion of glycoproteins.

[0527] In some aspects, provided is a method comprising subjecting the extract from the dried blood sample, or portion thereof, to a thermal denaturation technique to produce a denatured sample.

[0528] In other aspects, provided is a method comprising subjecting the extract from the dried blood sample, or portion thereof, to a thermal denaturation technique to produce a denatured sample followed by a proteolytic digestion technique to produce a proteolytically digested sample comprising a proteolytic glycopeptide. In some embodiments, the method comprises quenching one or more proteases used in a proteolytic digestion technique prior to a downstream technique, such as LC-MS.

[0529] In other aspects, provided herein is a method comprising: subjecting the extract from the dried blood sample, or portion thereof, to a thermal denaturation technique to produce a denatured sample; subjecting the denatured sample to a reduction technique to produce a reduced sample; subjecting the reduced sample to an alkylation technique to produce an alkylated sample; and subjecting the alkylated sample to a proteolytic digestion technique to produce a proteolytically digested sample comprising the proteolytic glycopeptide. In some embodiments, the method comprises quenching an alkylating agent used in the alkylation technique prior to subjecting an alkylated sample to a proteolytic digestion technique. In some embodiments, the method comprises quenching one or more proteases used in a proteolytic digestion technique prior to a downstream technique, such as LC-MS.

[0530] In some embodiments, the proteolytic digestion methods described herein produce a proteolytic digestion sample, including one comprising a proteolytic glycopeptide, having a digestion completion rate of at least about 70%, such as at least about any of 75%, 80%, 85%, 90%, 91%, 92%, 93%, 94%, 95%, 96%, 97%, 98%, or 99%. In some embodiments, the proteolytic digestion methods described herein produce a proteolytic digestion sample, including one comprising a proteolytic glycopeptide, wherein the sample volume loss is 10% or less, such as 9% or less, 8% or less, 7% or less, 6% or less, 5% or less, 4% or less, 3% or less, 2% or less, or 1% or less, based on all volumes added in producing the proteolytic digestion sample.

[0531] In the following sections, additional description of the various aspects of the proteolytic digestion techniques is provided. Such description in a modular fashion is not intended to limit the scope of the disclosure, and based on the teachings provided herein one of ordinary skill in the art will readily appreciate that certain modules can be integrated, at least in part. The section heading used herein are for organizational purposes only and are not to be construed as limiting the subject matter described.

### I. Thermal Denaturation Techniques

[0532] In certain aspects, the methods provided herein comprise performing a thermal denaturation technique. Thermal denaturation techniques, generally speaking, change certain polypeptides conformational structures, such as by unfolding and/or linearizing a polypeptide, to enable protease access to cleavage sites. Thermal denaturation techniques described herein comprise subjecting a sample, or a derivative thereof (e.g., a sample diluted with a buffer), to a thermal treatment of about 60° C. to about 100° C. for thermal denaturation incubation time of at least about 1 minute. In some embodiments, the thermal denaturation technique is not performed concurrently with a chemical denaturation technique, such as using high concentrations of denaturing agent, e.g., 6M urea. In some embodiments, the method does not include use of a chemical denaturation technique.

[0533] In some embodiments, the thermal denaturation incubation time is performed at a temperature of about 60° C. to about 100° C., such as any of about 70° C. to about 100° C., about 80° C. to about 100° C., about 90° C. to about 100° C., about 95° C. to about 100° C., or about 85° C. to about 95° C. In some embodiments, the thermal denaturation incubation time is performed at a temperature of at least about 60° C., such as at least about any of 65° C., 70° C., 75° C., 80° C., 85° C., 90° C., 95° C., or 100° C. In some embodiments, the thermal denaturation incubation time is performed at a temperature of about 100° C. or less, such as about any of 95° C. or less, 90° C. or less, 85° C. or less, 80° C. or less, 75° C. or less, 70° C. or less, 65° C. or less, 60° C. or less. In some embodiments, the thermal denaturation incubation time is performed at a temperature of about any of 60° C., 65° C., 70° C., 75° C., 80° C., 85° C., 90° C., 91° C., 92° C., 93° C., 94° C., 95° C., 96° C., 97° C., 98° C., 99° C., or 100° C.

[0534] In some embodiments, the thermal denaturation incubation time is about 1 minute to about 15 minutes, such as any of about 1 minute to about 5 minutes, about 1 minute to about 10 minutes, about 2.5 minutes to about 7.5 minutes, or about 5 minutes to about 15 minutes. In some embodiments, the thermal denaturation incubation time is at least about 1 minute, such as at least about any of 1.5 minutes, 2 minutes, 2.5 minutes, 3 minutes, 3.5 minutes, 4 minutes, 4.5 minutes, 5 minutes, 5.5 minutes, 6 minutes, 6.5 minutes, 7 minutes, 7.5 minutes, 8 minutes, 8.5 minutes, 9 minutes, 9.5 minutes, 10 minutes, 11 minutes, 12 minutes, 13 minutes, 14 minutes, or 15 minutes. In some embodiments, the thermal denaturation incubation time is about 15 minutes or less, such as about any of 14 minutes or less, 13 minutes or less, 12 minutes or less, 11 minutes or less, 10 minutes or less, 9.5 minutes or less, 9 minutes or less, 8.5 minutes or less, 8 minutes or less, 7.5 minutes or less, 7 minutes or less, 6.5 minutes or less, 6 minutes or less, 5.5 minutes or less, 5 minutes or less, 4.5 minutes or less, 4 minutes or less, 3.5 minutes or less, 3 minutes or less, 2.5 minutes or less, 2 minutes or less, 1.5 minutes or less, or 1 minute or less. In some embodiments, the thermal denaturation incubation time is about any of 1 minute, 1.5 minutes, 2 minutes, 2.5 minutes, 3 minutes, 3.5 minutes, 4 minutes, 4.5 minutes, 5 minutes, 5.5 minutes, 6 minutes, 6.5 minutes, 7 minutes, 7.5 minutes, 8 minutes, 8.5 minutes, 9 minutes, 9.5 minutes, 10 minutes, 11 minutes, 12 minutes, 13 minutes, 14 minutes, or 15 minutes.

[0535] In some embodiments, the thermal denaturation technique comprises a thermal denaturation incubation time of about 1 minute to about 15 minutes, such as about any of 1 minute, 2 minutes, 3 minutes, 4 minutes, 5 minutes, 6 minutes, 7 minutes, 8 minutes, 9 minutes 10 minutes, 11 minutes, 12 minutes, 13 minutes, 14 minutes, or 15 minutes, wherein the thermal denaturation incubation is performed at a temperature of about 60° C. to about 100° C., such about any of 60° C., 65° C., 70° C., 75° C., 80° C., 85° C., 90° C., 91° C., 92° C., 93° C., 94° C., 95° C., 96° C., 97° C., 98° C., 99° C., or 100° C.

[0536] The thermal denaturation incubation temperature can be controlled by numerous techniques and combinations thereof. In some embodiments, the thermal denaturation incubation temperature is controlled by a water bath. In some embodiments, the thermal denaturation incubation temperature is controlled by a heat block. In some embodiments, the thermal denaturation incubation temperature is controlled by a thermocycler, e.g., a thermocycler with a lid temperature control element. As described herein, in some embodiments, control of sample temperature when performed using a thermocycler is via a temperature block element. In some embodiments, temperature changes prior to and/or after the thermal denaturation incubation time temperature are controlled by a technique described herein, such as cooling at room temperature or via the thermocycler.

[0537] In some embodiments, the thermal denaturation technique comprises subjecting a sample, or a derivative thereof, e.g., a sample diluted in a buffer, to a thermal cycle. In some embodiments, the thermal cycle comprises subjecting the sample, or a derivative thereof, to one or more of: (a) a block starting temperature (b) block set temperature (the temperature for the thermal denaturation incubation time); (c) a block ending temperature; (d) one or more ramp rates between temperature changes in the thermal cycle (such as between the block starting temperature and the block set temperature or between the block set temperature and the block ending temperature); and (e) a lid temperature relative to the block temperature. In some embodiments, the thermal cycle is performed, in whole or in part, using a thermocycler. In some embodiments, the thermal cycle is configured to reduce and/or prevent loss of sample, such as by escaping vapor and/or condensation when the sample container is opened. In some embodiments, the thermal cycle comprises a set block temperature of about 60° C. to about 100° C., including about any of 60° C., 65° C., 70° C., 75° C., 80° C., 85° C., 90° C., 91° C., 92° C., 93° C., 94° C., 95° C., 96° C., 97° C., 98° C., 99° C., or 100° C. In some embodiments, the thermal cycle comprises: (a) a set block temperature of about 60° C. to about 100° C., including about any of 60° C., 65° C., 70° C., 75° C., 80° C., 85° C., 90° C., 91° C., 92° C., 93° C., 94° C., 95° C., 96° C., 97° C., 98° C., 99° C., or 100° C., and (b) a block ending temperature of about 15° C. to about 35° C., such as any of about 20° C. to about 35° C., or about 20° C. to about 25° C. In some embodiments, the thermal cycle comprises: (a) starting block temperature of about 15° C. to about 50° C., such as any of 15° C. to about 25° C., about 20° C. to about 30° C., or about 20° C. to about 25° C., including about any of 20° C., 21° C., 22° C., 23° C., 24° C., 25° C., (b) a set block temperature of about 60° C. to about 100° C., such about any of 60° C., 65° C., 70° C., 75° C., 80° C., 85° C., 90° C., 91° C., 92° C., 93° C., 94° C., 95° C., 96° C., 97° C., 98° C., 99° C., or 100° C., and (c) a block ending temperature of about 15° C. to about 35° C., such as any of about 20° C. to about 35° C., or about 20° C. to about 25° C. In any of the thermal cycles described herein, in some embodiments, the lid temperature during the thermal cycle is configured to reduce and/or inhibit condensate formation near or on the lid of a sample container. In some embodiments, the lid temperature during the thermal cycle is at least about 2° C., such as at least about any of 2.5° C., 3° C., 3.5° C., 4° C., 4.5° C., 5° C., 5.5° C., 6° C., 6.5° C., 7° C., 7.5° C., 8° C., 8.5° C., 9° C., 9.5° C., 10° C., 11° C., 12° C., 13° C., 14° C., 15° C., 16° C., 17° C., 18° C., 19° C., or 20° C., higher than the respective temperature of the block during the thermal cycle. In some embodiments, the lid temperature during at least a portion of a thermal cycle is about 102° C. to about 120° C., such as about any of 103° C., 104° C., 105° C., 106° C., 107° C., 108° C., 109° C., or 110° C. In some embodiments, the lid temperature during the thermal cycle may be the same respective temperature of the block during the thermal cycle or a temperature greater than the temperature of the block during the thermal cycle. In some embodiments, the lid temperature during the thermal cycle may be the same respective temperature of the block during the thermal cycle or a temperature greater than the temperature of the block during the thermal cycle.

[0538] In some embodiments, the ramp rate between a temperature change in a thermal cycle (such as between a block starting temperature and a block set temperature and/or between a block set temperature a the block ending temperature) is about 1° C./second to about 10° C./second, such as any of 1° C./second, 1.5° C./second, 2° C./second, 2.5° C./second, 3° C./second, 3.5° C./second, 4° C./second, 4.5° C./second, 5° C./second, 5.5° C./second, 6° C./second, 6.5° C./second, 7° C./second, 7.5° C./second, 8° C./second, 8.5° C./second, 9° C./second, 9.5° C./second, or 10° C./second.

[0539] In some embodiments, the method further comprises admixing an amount of a blood sample, or portion thereof, a buffer prior to the thermal denaturation technique (e.g., the buffered sample is subjected to a thermal denaturation technique described herein). In some embodiment, the amount (as assessed based on the final concentration in the sample containing solution containing solution) of the buffer is about 1 mM to about 100 mM, such as any of about 20 mM to about 80 mM, about 30 mM to about 70 mM, or about 40 mM to about 60 mM. In some embodiment, the amount of the buffer is about any of 10 mM, 15 mM, 20 mM, 25 mM, 30 mM, 35 mM, 40 mM, 45 mM, 50 mM, 55 mM, 60 mM, 65 mM, 70 mM, 75 mM, 80 mM, 85 mM, 90 mM, 95 mM, or 100 mM. In some embodiments, the buffer is selected from the group consisting of ammonium bicarbonate, ammonium acetate, ammonium formate, triethylammonium bicarbonate, and Tris-HCl, or any combination thereof.

[0540] In some embodiments, the method further comprises determining the protein concentration in a blood sample or a derivative thereof.

### II. Reduction Techniques

[0541] In certain aspects, the methods provided herein comprise performing a reduction technique. In some embodiments, the reduction technique is performed on a sample, or a derivative thereof, following thermal denaturation. Reduction techniques, generally speaking, reduce (e.g., cleave) disulfide linkages between cysteine residues of one or more polypeptides to reduce the presence of polypeptide conformations that inhibit or prevent protease cleavage of the one or more polypeptides. Reduction techniques described herein comprise subjecting a sample, or a derivative thereof (e.g., a denatured sample), to an amount of a reducing agent and incubating for a reducing incubation time performed at a temperature or range thereof.

[0542] In some embodiments, the reducing agent is dithiothreitol (DTT), tris(2-carboxyethyl) phosphine (TCEP), beta-mercaptoethanol (BME), or a cysteine, or any mixture thereof.

[0543] In some embodiments, the amount (as assessed based on the final concentration in the sample containing solution containing solution) of a reducing agent, e.g., DTT, used in a reduction technique is about 1 mM to about 100 mM, such as any of about 1 mM to about 40 mM, about 1 mM to about 30 mM, about 5 mM to about 25 mM, about 10 mM, to about 20 mM, 20 mM to about 80 mM, about 30 mM to about 70 mM, or about 40 mM to about 60 mM. In some embodiments, the amount of reducing agent used in a reduction technique is at least about 1 mM, such as at least about any of 2 mM, 3 mM, 4 mM, 5 mM, 6 mM, 7 mM, 8 mM, 9 mM, 10 mM, 11 mM, 12 mM, 13 mM, 14 mM, 15 mM, 16 mM, 17 mM, 18 mM, 19 mM, 20 mM, 25 mM, 30 mM, 35 mM, 40 mM, 45 mM, 50 mM, 55 mM, 60 mM, 65 mM, 70 mM, 75 mM, 80 mM, 85 mM, 90 mM, 95 mM, or 100 mM. In some embodiments, the amount of reducing agent used in a reduction technique is about 100 mM or less, such as about any of 95 mM or less, 90 mM or less, 85 mM or less, 80 mM or less, 75 mM or less, 70 mM or less, 65 mM or less, 60 mM or less, 55 mM or less, 50 mM or less, 45 mM or less, 40 mM or less, 35 mM or less, 30 mM or less, 25 mM or less, 20 mM or less, 19 or less, 18 or less, 17 or less, 16 or less, 15 or less, 14 or less, 13 or less, 12 or less, 11 or less, 10 or less, 9 or less, 8 or less, 7 or less, 6 or less, 5 or less, 4 or less, 3 or less, 2 or less, or 1 or less. In some embodiments, the amount of reducing agent used in a reduction technique is about any of 1 mM, 2 mM, 3 mM, 4 mM, 5 mM, 6 mM, 7 mM, 8 mM, 9 mM, 10 mM, 11 mM, 12 mM, 13 mM, 14 mM, 15 mM, 16 mM, 17 mM, 18 mM, 19 mM, 20 mM, 25 mM, 30 mM, 35 mM, 40 mM, 45 mM, 50 mM, 55 mM, 60 mM, 65 mM, 70 mM, 75 mM, 80 mM, 85 mM, 90 mM, 95 mM, or 100 mM.

[0544] In some embodiments, the reduction incubation time is about 10 minutes to about 120 minutes, such as any of about 30 minutes to about 60 minutes, about 40 minutes to about 60 minutes, about 45 minutes to about 55 minutes. In some embodiments, the reduction incubation time is at least about 20 minutes, such as at least about any of 25 minutes, 30 minutes, 35 minutes, 40 minutes, 45 minutes, 50 minutes, 55 minutes, 60 minutes, 65 minutes, 70 minutes, 75 minutes, 80 minutes, 85 minutes, 90 minutes, 95 minutes, 100 minutes, 105 minutes, 110 minutes, 115 minutes. In some embodiments, the reduction incubation time is about 120 minutes or less, such as about any of 115 minutes or less, 110 minutes or less, 105 minutes or less, 100 minutes or less, 95 minutes or less, 90 minutes or less, 85 minutes or less, 80 minutes or less, 75 minutes or less, 70 minutes or less, 65 minutes or less, 60 minutes or less, 55 minutes or less, 50 minutes or less, 45 minutes or less, 40 minutes or less, 35 minutes or less, 30 minutes or less, or 25 minutes or less. In some embodiments, the reduction incubation time is about any of 20 minutes, 25 minutes, 30 minutes, 35 minutes, 40 minutes, 45 minutes, 50 minutes, 55 minutes, 60 minutes, 65 minutes, 70 minutes, 75 minutes, 80 minutes, 85 minutes, 90 minutes, 95 minutes, 100 minutes, 105 minutes, 110 minutes, 115 minutes.

[0545] In some embodiments, the reduction incubation time is performed at a temperature of about 20° C. to about 100° C., such as any of about 40° C. to about 80° C., about 50° C. to about 70° C., about 50° C. to about 60° C., about 55° C. to about 65° C., or about 60° C. to about 70° C. In some embodiments, the reduction incubation time is performed at a temperature of at least about 20° C., such as at least about any of 25° C., 30° C., 35° C., 40° C., 45° C., 50° C., 55° C., 60° C., 65° C., 70° C., 75° C., 80° C., 85° C., 90° C., or 95° C. In some embodiments, the reduction incubation time is performed at a temperature of about 95° C. or less, such as about any of 90° C. or less, 85° C. or less, 80° C. or less, 75° C. or less, 70° C. or less, 65° C. or less, 60° C. or less, 55° C. or less, 50° C. or less, 45° C. or less, 40° C. or less, 35° C. or less, 30° C. or less, or 25° C. or less. In some embodiments, the reduction incubation time is performed at a temperature of about any of 20° C., 25° C., 30° C., 35° C., 40° C., 45° C., 50° C., 51° C., 52° C., 53° C., 54° C., 55° C., 56° C., 57° C., 58° C., 59° C., 60° C., 61° C., 62° C., 63° C., 64° C., 65° C., 66° C., 67° C., 68° C., 69° C., 70° C., 75° C., 80° C., 85° C., 90° C., or 95° C. In some embodiments, the reduction incubation time is performed at a room temperature.

[0546] In some embodiments, the reduction technique comprises a reduction incubation time of about 30 minutes to about 70 minutes, such as about any of 35 minutes, 40 minutes, 45 minutes, 50 minutes, 55 minutes, 60 minutes, or 65 minutes, wherein the reduction incubation time is performed at a temperature of about 50° C. to about 70° C., such about any of 55° C., 60° C., or 65° C. In some embodiments, the reduction technique comprises use of an amount (as assessed based on the final concentration in the sample containing solution) of a reducing agent, e.g., DTT, of about 5 mM to about 25 mM, such as any of about 6 mM, 7 mM, 8 mM, 9 mM, 10 mM, 11 mM, 12 mM, 13 mM, 14 mM, 15 mM, 16 mM, 17 mM, 18 mM, 19 mM, 20 mM, 21 mM, 22 mM, 23 mM, or 24 mM, and a reduction incubation time of about 30 minutes to about 70 minutes, such as about any of 35 minutes, 40 minutes, 45 minutes, 50 minutes, 55 minutes, 60 minutes, or 65 minutes, wherein the reduction incubation time is performed at a temperature of about 50° C. to about 70° C., such about any of 55° C., 60° C., or 65° C.

[0547] The reduction incubation temperature can be controlled by numerous techniques and combinations thereof. In some embodiments, the reduction incubation temperature is controlled by an ambient temperature, such as room temperature. In some embodiments, the reduction incubation temperature is controlled by a water bath. In some embodiments, the reduction incubation temperature is controlled by a heat block. In some embodiments, the reduction incubation temperature is controlled by a thermocycler, e.g., a thermocycler with a lid temperature control element. As described herein, in some embodiments, control of sample temperature when performed using a thermocycler is via a temperature block element. In some embodiments, temperature changes prior to and/or after the reduction incubation time temperature are controlled by a technique described herein, such as cooling at room temperature or a ramp rate.

[0548] In some embodiments, the reduction technique comprises subjecting a sample, or a derivative thereof, e.g., a denatured sample, to a thermal cycle. In some embodiments, the thermal cycle comprises subjecting the sample, or a derivative thereof, to one or more of: (a) a block starting temperature (b) block set temperature (the temperature for the reduction incubation time); (c) a block ending temperature; (d) one or more ramp rates between temperature changes in the thermal cycle (such as between the block starting temperature and the block set temperature or between the block set temperature and the block ending temperature); and (e) a lid temperature relative to the block temperature. In some embodiments, the thermal cycle is performed, in whole or in part, using a thermocycler. In some embodiments, the thermal cycle is configured to reduce and/or prevent loss of sample, such as by escaping vapor and/or condensation when the sample container is opened. In some embodiments, the thermal cycle comprises a set block temperature of about 20° C. to about 100° C., such as any of 40° C. to about 80° C., about 50° C. to about 70° C., about 50° C. to about 60° C., about 55° C. to about 65° C., or about 60° C. to about 70° C., including about any of 50° C., 55° C., 60° C., 65° C., or 70° C. In some embodiments, the thermal cycle comprises: (a) a set block temperature of about 20° C. to about 100° C., such as any of about 40° C. to about 80° C., about 50° C. to about 70° C., about 50° C. to about 60° C., about 55° C. to about 65° C., or about 60° C. to about 70° C., including about any of 50° C., 55° C., 60° C., 65° C., or 70° C., and (b) a block ending temperature of about 15° C. to about 35° C., such as any of about 20° C. to about 35° C., or about 20° C. to about 25° C. In some embodiments, the thermal cycle comprises: (a) starting block temperature of about 15° C. to about 60° C., such as any of about 15° C. to about 50° C., about 20° C. to about 40° C., about 20° C. to about 30° C., or about 20° C. to about 25° C., (b) a set block temperature of about 20° C. to about 100° C., such as any of about 40° C. to about 80° C., about 50° C. to about 70° C., about 50° C. to about 60° C., about 55° C. to about 65° C., or about 60° C. to about 70° C., including about any of 50° C., 55° C., 60° C., 65° C., or 70° C., and (c) a block ending temperature of about 15° C. to about 35° C., such as any of about 20° C. to about 35° C., or about 20° C. to about 25° C. In any of the thermal cycles described herein, in some embodiments, the lid temperature during the thermal cycle is configured to reduce and/or inhibit condensate formation near or on the lid of a sample container. In some embodiments, the lid temperature during the thermal cycle is at least about 2° C., such as at least about any of 2.5° C., 3° C., 3.5° C., 4° C., 4.5° C., 5° C., 5.5° C., 6° C., 6.5° C., 7° C., 7.5° C., 8° C., 8.5° C., 9° C., 9.5° C., 10° C., 11° C., 12° C., 13° C., 14° C., 15° C., 16° C., 17° C., 18° C., 19° C., or 20° C., higher than the respective temperature of the block during the thermal cycle. In some embodiments, the lid temperature during at least a portion of a thermal cycle is about 102° C. to about 120° C., such as about any of 103° C., 104° C., 105° C., 106° C., 107° C., 108° C., 109° C., or 110° C.

[0549] In some embodiments, the ramp rate between a temperature change in a thermal cycle (such as between a block starting temperature and a block set temperature and/or between a block set temperature a the block ending temperature) is about 1° C./second to about 10° C./second, such as any of 1° C./second, 1.5° C./second, 2° C./second, 2.5° C./second, 3° C./second, 3.5° C./second, 4° C./second, 4.5° C./second, 5° C./second, 5.5° C./second, 6° C./second, 6.5° C./second, 7° C./second, 7.5° C./second, 8° C./second, 8.5° C./second, 9° C./second, 9.5° C./second, or 10° C./second.

[0550] In some embodiments, the reduction technique described herein is completed simultaneously with a thermal denaturation step. For example, the combined thermal denaturation technique and reduction technique comprises adding a reducing agent to a sample, or a derivative thereof, and then subjecting the sample, or the derivative thereof, to a temperature of about 60° C. to about 100° C., such about any of 60° C., 65° C., 70° C., 75° C., 80° C., 85° C., 90° C., 91° C., 92° C., 93° C., 94° C., 95° C., 96° C., 97° C., 98° C., 99° C., or 100° C., for an incubation time of at least about 1 minute, such as at least about any of 2 minutes, 3 minutes, 4 minutes, 5 minutes, 10 minutes, 15 minutes, 20 minutes, 25 minutes, 30 minutes, 35 minutes, 40 minutes, 45 minutes, 50 minutes, 55 minutes, or 60 minutes. In some embodiments, the combined thermal denaturation technique and reduction technique comprises adding a reducing agent to a sample, or a derivative thereof, and then subjecting the sample, or the derivative thereof, to a temperature of about 90° C. to about 100° C., for an incubation time of about 40 minutes to about 60 minutes, including 50 minutes.

### III. Alkylation Techniques

[0551] In certain aspects, the methods provided herein comprise performing an alkylation technique. In some embodiments, the alkylation technique is performed on a sample, or a derivative thereof, following the performance of a reduction technique. Alkylation techniques, generally speaking, prevent the reformation of one or more disulfide linkages between, e.g., cysteine residues of one or more polypeptides. This is done by, e.g., the addition of an acetamide moiety to the sulfur of a cysteine residue thereby producing an alkylated polypeptide. Alkylation techniques may reduce the presence of polypeptide conformations that inhibit or prevent protease cleavage of the one or more polypeptides. Alkylation techniques described herein comprise subjecting a sample, or a derivative thereof (e.g., a reduced sample), to an amount of an alkylating agent and incubating for an alkylation incubation time performed at a temperature or range thereof. In some embodiments, the method comprises subjecting a denatured sample to a reduction technique followed by an alkylation technique prior to performing a proteolytic digestion technique.

[0552] In some embodiments, the alkylating agent is iodoacetamide (IAA), 2-chloroacetamide, an acetamide salt, or any mixture thereof.

[0553] In some embodiments, the amount (as assessed based on the final concentration in the sample containing solution) of an alkylating agent, e.g., IAA, used in an alkylation technique is about 10 mM to about 100 mM, such as any of about 10 mM to about 50 mM, about 20 mM to about 40 mM, about 20 mM to about 36 mM, about 15 mM to about 25 mM, about 20 mM to about 25 mM, about 20 mM to about 80 mM, about 30 mM to about 70 mM, or about 40 mM to about 60 mM. In some embodiments, the amount of an alkylating agent used in an alkylation technique is at least about 10 mM, such as at least about any of 15 mM, 16 mM, 17 mM, 18 mM, 19 mM, 20 mM, 21 mM, 22 mM, 23 mM, 24 mM, 25 mM, 30 mM, 35 mM, 40 mM, 45 mM, 50 mM, 55 mM, 60 mM, 65 mM, 70 mM, 75 mM, 80 mM, 85 mM, 90 mM, 95 mM, or 100 mM. In some embodiments, the amount of an alkylating agent used in an alkylation technique is about 100 mM or less, such as about any of 95 mM or less, 90 mM or less, 85 mM or less, 80 mM or less, 75 mM or less, 70 mM or less, 65 mM or less, 60 mM or less, 55 mM or less, 50 mM or less, 45 mM or less, 40 mM or less, 35 mM or less, 30 mM or less, 25 mM or less, 24 mM or less, 23 mM or less, 22 mM or less, 21 mM or less, 20 mM or less, 19 mM or less, 18 mM or less, 17 mM or less, 16 mM or less, 15 mM or less, or 10 mM or less. In some embodiments, the amount of an alkylating agent used in an alkylation technique is about any of 10 mM, 15 mM, 20 mM, 20.5 mM, 21 mM, 21.5 mM, 22 mM, 22.5 mM, 23 mM, 23.5 mM, 24 mM, 24.5 mM, 25 mM, 30 mM, 35 mM, 40 mM, 45 mM, 50 mM, 55 mM, 60 mM, 65 mM, 70 mM, 75 mM, 80 mM, 85 mM, 90 mM, 95 mM, or 100 mM.

[0554] In some embodiments, the alkylation incubation time is about 5 minutes to about 60 minutes, such as any of about 10 minutes to about 50 minutes, about 20 minutes to about 40 minutes, about 25 minutes to about 35 minutes. In some embodiments, the alkylation incubation time is at least about 5 minutes, such as at least about any of 10 minutes, 15 minutes, 20 minutes, 25 minutes, 30 minutes, 35 minutes, 40 minutes, 45 minutes, 50 minutes, 55 minutes, or 60 minutes. In some embodiments, the alkylation incubation time is about 60 minutes or less, such as about any of 55 minutes or less, 50 minutes or less, 45 minutes or less, 40 minutes or less, 35 minutes or less, 30 minutes or less, 25 minutes or less, 20 minutes or less, 15 minutes or less, 10 minutes or less, or 5 minutes or less. In some embodiments, the alkylation incubation time is about any of 5 minutes, 10 minutes, 15 minutes, 20 minutes, 25 minutes, 30 minutes, 35 minutes, 40 minutes, 45 minutes, 50 minutes, 55 minutes, or 60 minutes.

[0555] In some embodiments, the alkylation incubation time is performed at a temperature of about 15° C. to about 100° C., such as any of about 15° C. to about 80° C., about 15° C. to about 60° C., about 15° C. to about 35° C., about 20° C. to about 30° C., or about 20° C. to about 25° C. In some embodiments, the alkylation incubation time is performed at a temperature of at least about 15° C., such as at least about any of 20° C., 21° C., 22° C., 23° C., 24° C., 25° C., 30° C., 35° C., 40° C., 45° C., 50° C., 55° C., 60° C., 65° C., 70° C., 75° C., 80° C., 85° C., 90° C., or 95° C. In some embodiments, the alkylation incubation time is performed at a temperature of about 95° C. or less, such as about any of 90° C. or less, 85° C. or less, 80° C. or less, 75° C. or less, 70° C. or less, 65° C. or less, 60° C. or less, 55° C. or less, 50° C. or less, 45° C. or less, 40° C. or less, 35° C. or less, 30° C. or less, 25° C. or less, 24° C. or less, 23° C. or less, 22° C. or less, 21° C. or less, or 20° C. or less. In some embodiments, the alkylation incubation time is performed at a temperature of about any of 15° C., 16° C., 17° C., 18° C., 19° C., 20° C., 21° C., 22° C., 23° C., 24° C., 25° C., 30° C., 35° C., 40° C., 45° C., 50° C., 51° C., 52° C., 53° C., 54° C., 55° C., 56° C., 57° C., 58° C., 59° C., 60° C., 61° C., 62° C., 63° C., 64° C., 65° C., 66° C., 67° C., 68° C., 69° C., 70° C., 75° C., 80° C., 85° C., 90° C., or 95° C. In some embodiments, the alkylation incubation time is performed at a room temperature.

[0556] In some embodiments, the alkylation technique comprises an alkylation incubation time of about 5 minutes to about 60 minutes, such as about any of 15 minutes, 20 minutes, 25 minutes, 30 minutes, 35 minutes, or 40 minutes, wherein the alkylation incubation time is performed at a temperature of about 15° C. to about 30° C., such about any of 20° C., 21° C., 22° C., 23° C., 24° C., 25° C. In some embodiments, the alkylation technique comprises use of an amount (containing solution based on the final concentration in the sample) of an alkylating agent, e.g., IAA, of about 15 mM to about 40 mM, such as any of about 20 mM, 20.5 mM, 21 mM, 21.5 mM, 22 mM, 22.5 mM, 23 mM, 23.5 mM, 24 mM, 24.5 mM, 25 mM, 25.5 mM, 26 mM, 26.5 mM, 27 mM, 27.5 mM, 28 mM, 28.5 mM, 29 mM, 29.5 mM, 30 mM, 30.5 mM, 31 mM, 31.5 mM, 32 mM, 32.5 mM, 33 mM, 33.5 mM, 34 mM, 34.5 mM, 35 mM, 35.5 mM, 36 mM, 36.5 mM, 37 mM, 37.5 mM, 38 mM, and an alkylation incubation time of about 5 minutes to about 60 minutes, such as about any of 15 minutes, 20 minutes, 25 minutes, 30 minutes, 35 minutes, or 40 minutes, wherein the alkylation incubation time is performed at a temperature of about 15° C. to about 30° C., such about any of 20° C., 21° C., 22° C., 23° C., 24° C., or 25° C.

[0557] The alkylation incubation temperature can be controlled by numerous techniques and combinations thereof. In some embodiments, the alkylation incubation temperature is controlled by an ambient temperature, such as room temperature. In some embodiments, the alkylation incubation temperature is controlled by a water bath. In some embodiments, the alkylation incubation temperature is controlled by a heat block. In some embodiments, the alkylation incubation temperature is controlled by a thermocycler, e.g., a thermocycler with a lid temperature control element. As described herein, in some embodiments, control of sample temperature when performed using a thermocycler is via a temperature block element. In some embodiments, temperature changes prior to and/or after the alkylation incubation time temperature are controlled by a technique described herein, such as cooling at room temperature or a ramp rate.

[0558] In some embodiments, the alkylation technique comprises subjecting a sample, or a derivative thereof, e.g., a denatured sample, to a thermal cycle. In some embodiments, the thermal cycle comprises subjecting the sample, or a derivative thereof, to one or more of: (a) a block starting temperature (b) block set temperature (the temperature for the alkylation incubation time); (c) a block ending temperature; (d) one or more ramp rates between temperature changes in the thermal cycle (such as between the block starting temperature and the block set temperature or between the block set temperature and the block ending temperature); and (e) a lid temperature relative to the block temperature. In some embodiments, the thermal cycle is performed, in whole or in part, using a thermocycler. In some embodiments, the thermal cycle is configured to reduce and/or prevent loss of sample, such as by escaping vapor and/or condensation when the sample container is opened. In some embodiments, the thermal cycle comprises a set block temperature of about 15° C. to about 30° C., such as any of 15° C. to about 25° C., about 20° C. to about 30° C., or about 20° C. to about 25° C., including about any of 20° C., 21° C., 22° C., 23° C., 24° C., or 25° C. In some embodiments, the thermal cycle comprises: (a) a set block temperature of about 15° C. to about 30° C., such as any of 15° C. to about 25° C., about 20° C. to about 30° C., or about 20° C. to about 25° C., including about any of 20° C., 21° C., 22° C., 23° C., 24° C., 25° C., and (b) a block ending temperature of about 15° C. to about 35° C., such as any of about 20° C. to about 35° C., or about 20° C. to about 25° C. In some embodiments, the thermal cycle comprises: (a) starting block temperature of about 15° C. to about 30° C., such as any of 15° C. to about 25° C., about 20° C. to about 30° C., or about 20° C. to about 25° C., including about any of 20° C., 21° C., 22° C., 23° C., 24° C., 25° C., (b) a set block temperature of about 15° C. to about 30° C., such as any of 15° C. to about 25° C., about 20° C. to about 30° C., or about 20° C. to about 25° C., including about any of 20° C., 21° C., 22° C., 23° C., 24° C., 25° C., and (c) a block ending temperature of about 15° C. to about 35° C., such as any of about 20° C. to about 35° C., or about 20° C. to about 25° C. In any of the thermal cycles described herein, in some embodiments, the lid temperature during the thermal cycle is configured to reduce and/or inhibit condensate formation near or on the lid of a sample container. In some embodiments, the lid temperature during the thermal cycle is at least about 2° C., such as at least about any of 2.5° C., 3° C., 3.5° C., 4° C., 4.5° C., 5° C., 5.5° C., 6° C., 6.5° C., 7° C., 7.5° C., 8° C., 8.5° C., 9° C., 9.5° C., 10° C., 11° C., 12° C., 13° C., 14° C., 15° C., 16° C., 17° C., 18° C., 19° C., or 20° C., higher than the respective temperature of the block during the thermal cycle. In some embodiments, the lid temperature during at least a portion of a thermal cycle is about 102° C. to about 120° C., such as about any of 103° C., 104° C., 105° C., 106° C., 107° C., 108° C., 109° C., or 110° C.

[0559] In some embodiments, the alkylation technique further comprises quenching the alkylating agent comprising use of a neutralizing agent. In some embodiments, the neutralizing agent is a reducing agent. In some embodiments, the reducing agent is dithiothreitol (DTT), tris(2-carboxyethyl) phosphine (TCEP), beta-mercaptoethanol (BME), or a cysteine, or any mixture thereof. In some embodiments, the neutralizing agent is added in an amount to fully quench the amount of the alkylating agent, such as in an amount greater than or equal to a molar amount of an active moiety of the alkylating agent. In some embodiments, the amount (as assessed based on the final concentration in the sample containing solution) of the neutralizing agent is about 1 mM to about 100 mM.

[0560] In some embodiments, the alkylation technique, in whole or in part, is performed substantially in a low light condition. In some embodiments, the alkylation incubation time is performed in a low light condition. In some embodiments, the low light condition is in the dark or a location substantially devoid of sunlight and/or room lighting, such as in a desk drawer. In some embodiments, the low light condition is a filtered light, such as red light.

[0561] In some embodiments, the alkylating agent is sourced from a stock solution. In some embodiments, the stock solution is prepared within about 1 hour, such as within about any of 50 minutes, 40 minutes, 30 minutes, 20 minutes, or 10 minutes, of use.

[0562] In some embodiments, the ramp rate between a temperature change in a thermal cycle (such as between a block starting temperature and a block set temperature and/or between a block set temperature a the block ending temperature) is about 1° C./second to about 10° C./second, such as any of 1° C./second, 1.5° C./second, 2° C./second, 2.5° C./second, 3° C./second, 3.5° C./second, 4° C./second, 4.5° C./second, 5° C./second, 5.5° C./second, 6° C./second, 6.5° C./second, 7° C./second, 7.5° C./second, 8° C./second, 8.5° C./second, 9° C./second, 9.5° C./second, or 10° C./second.

### IV. Proteolytic Digestion Techniques

[0563] In certain aspects, the methods provided herein comprise performing a proteolytic digestion technique. In some embodiments, the proteolytic digestion technique is performed on a sample, or a derivative thereof, following thermal denaturation and/or any additional steps intended to expose protease cleavage sites. Proteolytic digestion techniques, generally speaking, cleave polypeptides at known cleavage sites. For example, trypsin is a serine protease that generally cleaves polypeptides at the carboxyl side (C-terminal side) of lysine and arginine residues. Certain exceptions apply to the cleavage pattern of trypsin, such as due to proximity of a proline residue and/or a post-translational modification causing steric hindrance relative to the cleavage site. Proteolytic digestion techniques described herein comprise subjecting a sample, or a derivative thereof (e.g., a denatured sample or an alkylated sample, including an alkylated sample subjected to a reduction technique prior to an alkylation technique), to an amount of one or more proteases and incubating for a digestion incubation time performed at a temperature or range thereof.

[0564] In some embodiments, each of the one or more proteases is trypsin, LysC, LysN, AspN, GluC, ArgC, IdeS, IdeZ, PNGase F, thermolysin, pepsin, elastase, TEV, or Factor Xa, or any mixture thereof. In some embodiments, wherein two or more proteases are used, the weight ratio between a first protease and a second protease is about 1:10 to about 10:1, such as about any of about 1:9, 1:8, 1:7: 1:6, 1:5, 1:4, 1:3, 1:2, or 1:1. In some embodiments, the one or more proteases is trypsin. In some embodiments, the one or more proteases is a mixture of trypsin and LysC, such as in a weight ratio of about 1:1. In some embodiments, the one or more proteases is selected based on the type and/or characteristic of a blood sample, or components thereof, used in the methods herein. In some embodiments, the blood sample is processed by the absorbent or bibulous member such that a plasma sample is obtained, wherein the one or more proteases is trypsin and Lys-C, such as in a weight ratio of about 1:1. In some embodiments, the blood sample is processed by the absorbent or bibulous member such that a serum sample is obtained, wherein the one or more proteases is trypsin. In some embodiments, the protease is a modified protease, such as comprising a modification to prevent or inhibit self-proteolysis. In some embodiments, the modified protease is a modified trypsin, such as a methylated and/or an acetylated trypsin. In some embodiments, the modified trypsin is a tosyl phenylalanyl chloromethyl ketone (TPCK)-treated trypsin.

[0565] In some embodiments, the amount of a protease, e.g., trypsin or LysC, used in a proteolytic digestion technique is based on a weight ratio relative to the polypeptide content of a sample, or a derivative thereof, (i.e., weight of a protease: weight of polypeptide content) of about 1:200 to about 1:10, such as any of about 1:100 to about 1:10, about 1:50 to about 1:10, about 1:40 to about 1:20, about 1:50 to about 1:30, about 1:45 to about 1:35, about 1:20 to about 1:40, about 1:30 to about 1:10, or about 1:25 to about 1:15. In some embodiments, the amount of a protease used in a proteolytic digestion technique is at least about 1:200, such as at least about any of 1:190, 1:180, 1:170, 1:160, 1:150, 1:140, 1:130, 1:120, 1:110, 1:100, 1:95, 1:90, 1:85, 1:80, 1:75, 1:70, 1:65, 1:60, 1:55, 1:50, 1:45, 1:40, 1:35, 1:30, 1:25, 1:20, 1:15, or 1:10. In some embodiments, the amount of a protease used in a proteolytic digestion technique is about 1:10 or less, such as about any of 1:15 or less, 1:20 or less, 1:25 or less, 1:30 or less, 1:35 or less, 1:40 or less, 1:45 or less, 1:50 or less, 1:55 or less, 1:60 or less, 1:65 or less, 1:70 or less, 1:75 or less, 1:80 or less, 1:85 or less, 1:90 or less, 1:95 or less, 1:100 or less, 1:110 or less, 1:120 or less, 1:130 or less, 1:140 or less, 1:150 or less, 1:160 or less, 1:170 or less, 1:180 or less, 1:190 or less, or 1:200 or less. In some embodiments, the amount of a protease used in a proteolytic digestion technique is about any of 1:10, 1:15, 1:20, 1:25, 1:30, 1:35, 1:40, 1:45, 1:50, 1:55, 1:60, 1:65, 1:70, 1:75, 1:80, 1:85, 1:90, 1:95, 1:100, 1:110, 1:120, 1:130, 1:140, 1:150, 1:160, 1:170, 1:180, 1:190, or 1:200. In some embodiments, the proteolytic digestion technique comprises the use of two or more proteases, such as a combination of trypsin and LysC, and in such embodiments, the amount of each protease (such as described above) can be summed to a total amount of proteases used in a proteolytic digestion technique.

[0566] In some embodiments, the proteolytic digestion incubation time is about 20 minutes to about 36 hours, such as any of about 1 hour to about 18 hours, about 5 hours to about 24 hours, about 12 hours to about 24 hours, about 16 hours to about 20 hours, or about 12 hours to about 36 hours. In some embodiments, the proteolytic digestion incubation time is about 36 hours or less, such as about any of 32 hours or less, 30 hours or less, 28 hours or less, 26 hours or less, 24 hours or less, 22 hours or less, 20 hours or less, 19 hours or less, 18 hours or less, 17 hours or less, 16 hours or less, 15 hours or less, 14 hours or less, 13 hours or less, 12 hours or less, 11 hours or less, 10 hours or less, 9 hours or less, 8 hours or less, 7 hours or less, 6 hours or less, 5 hours or less, 4 hours or less, 3 hours or less, 2 hours or less, or 1 hours or less. In some embodiments, the proteolytic digestion incubation time is at least about 20 minutes, such as at least about any of 30 minutes, 40 minutes, 50 minutes, 1 hour, 2 hours, 3 hours, 4 hours, 5 hours, 6 hours, 7 hours, 8 hours, 9 hours, 10 hours, 11 hours, 12 hours, 13 hours, 14 hours, 15 hours, 16 hours, 17 hours, 18 hours, 19 hours, 20 hours, 22 hours, 24 hours, 26 hours, 28 hours, 30 hours, 32 hours, 34 hours, or 36 hours. In some embodiments, the proteolytic digestion incubation time is about any of 20 minutes, 30 minutes, 40 minutes, 50 minutes, 1 hour, 2 hours, 3 hours, 4 hours, 5 hours, 6 hours, 7 hours, 8 hours, 9 hours, 10 hours, 11 hours, 12 hours, 13 hours, 14 hours, 15 hours, 16 hours, 17 hours, 18 hours, 19 hours, 20 hours, 22 hours, 24 hours, 26 hours, 28 hours, 30 hours, 32 hours, 34 hours, or 36 hours.

[0567] In some embodiments, the digestion incubation time is performed at a temperature of about 20° C. to about 60° C., such as any of about 20° C. to about 25° C., about 20° C. to about 30° C., about 25° C. to about 40° C., about 35° C. to about 40° C., or about 35° C. to about 50° C. In some embodiments, the digestion incubation time is performed at a temperature of at least about 20° C., such as at least about any of 21° C., 22° C., 23° C., 24° C., 25° C., 26° C., 27° C., 28° C., 29° C., 30° C., 31° C., 32° C., 33° C., 34° C., 35° C., 36° C., 37° C., 38° C., 39° C., 40° C., 42° C., 44° C., 46° C., 48° C., 50° C., 52° C., 54° C., 56° C., 58° C., or 60° C. In some embodiments, the digestion incubation time is performed at a temperature of about 60° C. or less, such about any of 58° C. or less, 56° C. or less, 54° C. or less, 52° C. or less, 50° C. or less, 48° C. or less, 46° C. or less, 44° C. or less, 42° C. or less, 40° C. or less, 39° C. or less, 38° C. or less, 37° C. or less, 36° C. or less, 35° C. or less, 34° C. or less, 33° C. or less, 32° C. or less, 31° C. or less, 30° C. or less, 29° C. or less, 28° C. or less, 27° C. or less, 26° C. or less, 25° C. or less, 24° C. or less, 23° C. or less, 22° C. or less, 21° C. or less, or 20° C. or less. In some embodiments, the digestion incubation time is performed at a temperature of about any of 20° C., 21° C., 22° C., 23° C., 24° C., 25° C., 26° C., 27° C., 28° C., 29° C., 30° C., 31° C., 32° C., 33° C., 34° C., 35° C., 36° C., 37° C., 38° C., 39° C., 40° C., 42° C., 44° C., 46° C., 48° C., 50° C., 52° C., 54° C., 56° C., 58° C., or 60° C. In some embodiments, the reduction incubation time is performed at a room temperature.

[0568] In some embodiments, the proteolytic digestion technique comprises a digestion incubation time of about 12 hours to about 24 hours, such as about any of 13 hours, 14 hours, 15 hours, 16 hours, 17 hours, 18 hours, 19 hours, 20 hours, 21 hours, 22 hours, 23 hours, wherein the digestion incubation time is performed at a temperature of about 20° C. to about 40° C., such about any of 22° C., 24° C., 26° C., 28° C., 30° C., 31° C., 32° C., 33° C., 34° C., 35° C., 36° C., 37° C., 38° C., 39° C. In some embodiments, the proteolytic digestion technique comprises use of an amount a protease for each of one or more proteases, e.g., trypsin and/or LysC, of about 1:15 to about 1:45, such as about any of 1:20, 1:25, 1:30, 1:35, or 1:40 (as measured based on the amount of the protease to the amount of polypeptide in a sample or a derivative thereof), and a digestion incubation time of about 12 hours to about 24 hours, such as about any of 13 hours, 14 hours, 15 hours, 16 hours, 17 hours, 18 hours, 19 hours, 20 hours, 21 hours, 22 hours, 23 hours, wherein the digestion incubation time is performed at a temperature of about 20° C. to about 40° C., such about any of 22° C., 24° C., 26° C., 28° C., 30° C., 31° C., 32° C., 33° C., 34° C., 35° C., 36° C., 37° C., 38° C., 39° C. In some embodiments, the proteolytic digestion technique is performed on a plasma sample or a derivate thereof, wherein the proteolytic digestion technique comprises a 1:40 ratio of trypsin to polypeptide in the sample of the derivative thereof and a 1:40 ratio of LysC to polypeptide in the sample or the derivative thereof. In some embodiments, the proteolytic digestion technique is performed on a serum sample or a derivate thereof, wherein the proteolytic digestion technique comprises a 1:20 ratio of trypsin.

[0569] The digestion incubation temperature can be controlled by numerous techniques and combinations thereof. In some embodiments, the digestion incubation temperature is controlled by an ambient temperature, such as room temperature. In some embodiments, the digestion incubation temperature is controlled by a water bath. In some embodiments, the digestion incubation temperature is controlled by a heat block. In some embodiments, the digestion incubation temperature is controlled by a thermocycler, e.g., a thermocycler with a lid temperature control element. As described herein, in some embodiments, control of sample temperature when performed using a thermocycler is via a temperature block element. In some embodiments, temperature changes prior to and/or after the digestion incubation time temperature are controlled by a technique described herein, such as cooling at room temperature or a ramp rate.

[0570] In some embodiments, the proteolytic digestion technique comprises subjecting a sample, or a derivative thereof, e.g., an alkylated sample (including an alkylated sample quenched with a neutralizing agent), to a thermal cycle. In some embodiments, the thermal cycle comprises subjecting the sample, or a derivative thereof, to one or more of: (a) a block starting temperature (b) block set temperature (the temperature for the digestion incubation time); (c) a block ending temperature; (d) one or more ramp rates between temperature changes in the thermal cycle (such as between the block starting temperature and the block set temperature or between the block set temperature and the block ending temperature); and (e) a lid temperature relative to the block temperature. In some embodiments, the thermal cycle is performed, in whole or in part, using a thermocycler. In some embodiments, the thermal cycle is configured to reduce and/or prevent loss of sample, such as by escaping vapor and/or condensation when the sample container is opened. In some embodiments, the thermal cycle comprises a set block temperature of about 20° C. to about 50° C., including about any of 22° C., 24° C., 26° C., 28° C., 30° C., 31° C., 32° C., 33° C., 34° C., 35° C., 36° C., 37° C., 38° C., 39° C., 40° C., 42° C., 44° C., 46° C., 48° C.

[0571] In some embodiments, the thermal cycle comprises: (a) a set block temperature of about 20° C. to about 50° C., including about any of 22° C., 24° C., 26° C., 28° C., 30° C., 31° C., 32° C., 33° C., 34° C., 35° C., 36° C., 37° C., 38° C., 39° C., 40° C., 42° C., 44° C., 46° C., 48° C., and (b) a block ending temperature of about 15° C. to about 35° C., such as any of about 20° C. to about 35° C., or about 20° C. to about 25° C. In some embodiments, the thermal cycle comprises: (a) starting block temperature of about 15° C. to about 35° C., such as any of about 20° C. to about 35° C., or about 20° C. to about 25° C., (b) a set block temperature of about 20° C. to about 50° C., including about any of 22° C., 24° C., 26° C., 28° C., 30° C., 31° C., 32° C., 33° C., 34° C., 35° C., 36° C., 37° C., 38° C., 39° C., 40° C., 42° C., 44° C., 46° C., 48° C., and (c) a block ending temperature of about 15° C. to about 35° C., such as any of about 20° C. to about 35° C., or about 20° C. to about 25° C. In any of the thermal cycles described herein, in some embodiments, the lid temperature during the thermal cycle is configured to reduce and/or inhibit condensate formation near or on the lid of a sample container. In some embodiments, the lid temperature during the thermal cycle is at least about 2° C., such as at least about any of 2.5° C., 3° C., 3.5° C., 4° C., 4.5° C., 5° C., 5.5° C., 6° C., 6.5° C., 7° C., 7.5° C., 8° C., 8.5° C., 9° C., 9.5° C., 10° C., 11° C., 12° C., 13° C., 14° C., 15° C., 16° C., 17° C., 18° C., 19° C., or 20° C., higher than the respective temperature of the block during the thermal cycle. In some embodiments, the lid temperature during at least a portion of a thermal cycle is about 102° C. to about 120° C., such as about any of 103° C., 104° C., 105° C., 106° C., 107° C., 108° C., 109° C., or 110° C.

[0572] In some embodiments, the ramp rate between a temperature change in a thermal cycle (such as between a block starting temperature and a block set temperature and/or between a block set temperature a the block ending temperature) is about 1° C./second to about 10° C./second, such as any of 1° C./second, 1.5° C./second, 2° C./second, 2.5° C./second, 3° C./second, 3.5° C./second, 4° C./second, 4.5° C./second, 5° C./second, 5.5° C./second, 6° C./second, 6.5° C./second, 7° C./second, 7.5° C./second, 8° C./second, 8.5° C./second, 9° C./second, 9.5° C./second, or 10° C./second.

[0573] In some embodiments, the proteolytic digestion technique further comprises quenching the one or more proteolytic enzymes. In some embodiments, quenching the one or more proteolytic enzymes comprises denaturing the one or more proteolytic enzymes. In some embodiments, quenching the one or more proteolytic enzymes comprise adding an amount of an acid. In some embodiments, the acid is formic acid (FA) or trifluoroacetic acid (TFA), or a mixture thereof. In some embodiments, the amount (as assessed based on the final concentration in the sample containing solution) of the acid added is about any of 0.1% v/v, 0.2% v/v, 0.3% v/v, 0.4% v/v, 0.5% v/v, 0.6% v/v, 0.7% v/v, 0.8% v/v, 0.9% v/v, 1% v/v, 1.1% v/v, 1.2% v/v, 1.3% v/v, 1.4% v/v, 1.5% v/v, 1.6% v/v, 1.7% v/v, 1.8% v/v, 1.9% v/v, or 2% v/v.

### V. Additional Techniques

[0574] In certain aspects, the method provided herein comprise subjecting the proteolytically digested sample comprising a proteolytic glycopeptide to one or more additional steps prior to subjecting the proteolytically digested sample, or a derivative thereof, to a liquid chromatography-mass spectrometry (LC-MS) technique using a liquid chromatography system and a mass spectrometer. In some embodiments, the LC system is online with the MS (i.e., eluate from the LC system is directly introduced to the MS). In some embodiments, the one or more additional steps do not include a desalting step performed outside of the LC system (such as an offline desalting technique).

[0575] In some embodiments, the method further comprises adding a standard to the proteolytically digested sample prior to the LC-MS technique. In some embodiments, the standard is a stable isotope-internal standard (SI-IS) peptide mixture.

[0576] In some embodiments, the biological sample is not subjected to a high-abundant protein depletion technique prior to the thermal denaturation technique. For example, in some embodiments, the high-abundant protein depletion technique removes highly abundant proteins present in a blood sample, such as serum albumin.

### E3. Methods for Performing a LC-MS Analysis of a Proteolytic Glycopeptide

[0577] In certain aspects, provided herein is a method for performing a LC-MS analysis on a sample comprising a proteolytic glycopeptide.

[0578] In some embodiments, the liquid chromatography (LC) system is online with a mass spectrometer (i.e., proteolytic peptide species, including glycopeptides, are eluted from the LC system directing into the mass spectrometer via a mass spectrometer interface. In some embodiments, the LC technique comprises performing a chromatographic separation of one or more proteolytic peptides, including glycopeptides. In some embodiments, the one or more proteolytic peptides subjected to a chromatographic separation are obtained from a proteolytically digested sample, such as described herein. In some embodiments, the chromatographic separation is performed on a proteolytically digested sample, such as described herein, (e.g., no additional separation technique, such as a sample clean-up step, is performed to remove one or more components from proteolytically digested sample). In some embodiments, the chromatographic separation is performed on a proteolytically digested sample comprising at least about 5 mM of a buffer, such as ammonium bicarbonate. In some embodiments, the chromatographic separation is performed on a proteolytically digested sample comprising an amount, such as at least about 1 mM, of a reducing agent or a byproduct thereof, such as a stable six-membered ring with an internal disulfide bond derived from DTT. In some embodiments, the chromatographic separation is performed on a proteolytically digested sample comprising an amount, such as at least about 1 mM, of an alkylating agent or a byproduct thereof, such as iodide (I-) derived from IAA.

[0579] In some embodiments, the method comprises introducing the proteolytically digested sample to a LC-MS system. In some embodiments, the method comprises performing a chromatographic separation of the proteolytically digested sample. In some embodiments, the chromatography separation comprises a period of diversion (i.e., diverted from the mass spectrometer interface, e.g., to a waste receptacle) of an initial eluate from the proteolytically digested sample. In some embodiments, the initial eluate (as assessed from the sample front) diverted from the mass spectrometer is about 1 column volume of the chromatographic column to about 5 column volumes of the chromatographic column, such as any of about 1 column volumes to about 4 column volumes, about 2 column volumes to about 5 column volumes, or about 3 column volumes to about 4 column volumes. In some embodiments, the initial eluate (as assessed from the sample front) diverted from the mass spectrometer is at least about 0.5 column volumes, such as at least about any of 1 column volume, 1.5 column volumes, 2 column volumes, 2.5 column volumes, 3 column volumes, 3.5 column volumes, 4 column volumes, 4.5 column volumes, or 5 column volumes. In some embodiments, the initial eluate (as assessed from the sample front) diverted from the mass spectrometer is about 5 column volumes or less, such as about any of 4.5 column volumes or less, 4 column volumes or less, 3.5 column volumes or less, 3 column volumes or less, 2.5 column volumes or less, 2 column volumes or less, 1.5 column volumes or less, 1 column volume or less, or 0.5 column volumes or less. In some embodiments, the initial eluate (as assessed from the sample front) diverted from the mass spectrometer is about any of 0.5 column volumes, 1 column volume, 1.5 column volumes, 2 column volumes, 2.5 column volumes, 3 column volumes, 3.5 column volumes, 4 column volumes, 4.5 column volumes, or 5 column volumes.

[0580] In some embodiments, the proteolytically digest sample is subjected to a solid phase extraction column comprising a reversed phase material prior to subjecting the polypeptide content therein to a LC-MS analysis In some embodiments, the reversed-phase medium comprises an alkyl-based moiety, such as an alkyl-based moiety comprising an octadecyl carbon functional group (C18) covalently bound to a silica solid phase. In some embodiments, the silica solid phase comprises a plurality of particles having an average largest cross-sectional distance (such as a diameter, e.g., as measured by dynamic light scattering) of about 20 μm. In some embodiments, each particle of the plurality of particles comprises an average pore size of about 150 Å, and wherein the pores are derivitized with the alkyl-based moiety. In some embodiments, the solid phase extraction column comprising the reversed-phase medium has a column volume of about 5 μL. In some embodiments, the solid phase extraction column is an AssayMap 5 μL C18 cartridge (catalog no. 5190-6532; Agilent Technologies). In some embodiments, the reversed-phase medium comprises an underivitized polystyrene divinylbenzene hydrophobic reversed-phase resin. In some embodiments, the polystyrene divinylbenzene hydrophobic reversed-phase resin comprises a plurality of particles having an average largest cross-sectional distance (such as a diameter, e.g., as measured by dynamic light scattering) of about 20 μm. In some embodiments, each particle of the plurality of particles comprises an average pore size of about 100 Å. In some embodiments, the solid phase extraction column comprising the reversed-phase medium has a column volume of about 5 μL. In some embodiments, the solid phase extraction column is an AssayMAP 5 μL Reversed Phase (RP-S) cartridge (catalog no. G5496-60033; Agilent Technologies).

[0581] In some embodiments, the column volume refers to the volume occupied by the reversed-phase media within the sample phase extraction column or cartridge. The reversed-phase media can be referred to as a bed that is compacted within a chromatography column to form a bed volume.

[0582] In some embodiments, the chromatographic separation comprises a gradient separation performing using mixtures of an aqueous mobile phase and an organic mobile phase. In some embodiments, the chromatographic separation comprises isocratic period, such as a period of at least about 90%, such as at least about any of 91%, 92%, 93%, 94%, 95%, 96%, 97%, 98%, 99%, or 100%, of an aqueous mobile phase to produce the initial eluate that is diverted from the mass spectrometer interface.

[0583] In some embodiments, the LC system comprises a reversed-phase chromatography column. In some embodiments, the reversed-phase column comprises an alkyl moiety, such as C18.

[0584] The present application contemplates a diverse array of additional features of LC-MS techniques for analyzing a sample comprising a glycopeptide using a mass spectrometer. In some embodiments, the liquid chromatography system comprises a high performance liquid chromatography system. In some embodiments, the liquid chromatography system comprises an ultra-high performance liquid chromatography system. In some embodiments, the liquid chromatography system comprises a high-flow liquid chromatography system. In some embodiments, the liquid chromatography system comprises a low-flow liquid chromatography system, such as a micro-flow liquid chromatography system or a nano-flow liquid chromatography system. In some embodiments, the liquid chromatography system is coupled, such as directly interfaced, with a mass spectrometer.

[0585] In some embodiment, the mass spectrometry technique comprises an ionization technique. Ionization techniques contemplated by the present application include techniques capable of charging polypeptides and peptide products, including glycopeptides. Thus, in some embodiments, the ionization technique is electrospray ionization. In some embodiments, the ionization technique is nano-electrospray ionization. In some embodiments, the ionization technique is atmospheric pressure chemical ionization. In some embodiments, the ionization technique is atmospheric pressure photoionization.

[0586] A diverse array of mass spectrometers are contemplated as compatible with the description, include high-resolution mass spectrometers and low-resolution mass spectrometers. In some embodiments, the mass spectrometer is a time-of-flight (TOF) mass spectrometer. In some embodiments, the mass spectrometer is a quadrupole time-of-flight (Q-TOF) mass spectrometer. In some embodiments, the mass spectrometer is a quadrupole ion trap time-of-flight (QIT-TOF) mass spectrometer. In some embodiments, the mass spectrometer is an ion trap. In some embodiments, the mass spectrometer is a single quadrupole. In some embodiments, the mass spectrometer is a triple quadrupole (QQQ). In some embodiments, the mass spectrometer is an orbitrap. In some embodiments, the mass spectrometer is a quadrupole orbitrap. In some embodiments, the mass spectrometer is a fourier transform ion cyclotron resonance (FT) mass spectrometer. In some embodiments, the mass spectrometer is a quadrupole fourier transform ion cyclotron resonance (Q-FT) mass spectrometer. In some embodiments, the mass spectrometry technique comprises positive ion mode. In some embodiments, the mass spectrometry technique comprises negative ion mode. In some embodiments, the mass spectrometry technique comprises an ion mobility mass spectrometry technique.

[0587] In some embodiments, the LC-MS technique comprises processing obtained signals MS from the mass spectrometer. In some embodiments, the LC-MS technique comprises peak detection. In some embodiments, the LC-MS technique comprises determining ionization intensity of an ionized peptide product. In some embodiments, the LC-MS technique comprises determining peak height of an ionized peptide product. In some embodiments, the LC-MS technique comprises determining peak area of an ionized peptide product. In some embodiments, the LC-MS technique comprises determining peak volume of an ionized peptide product. In some embodiments, the LC-MS technique comprises identifying an ionized peptide product by amino acid sequence. In some embodiments, the LC-MS technique comprises determining the site of a post-translational modification of an ionized peptide, such as the site of a glycosylation. In some embodiments, the LC-MS technique comprises determining the glycan structure, or a characteristic thereof, of an ionized peptide product. In some embodiments, the LC-MS technique comprises manually validating the ionized peptide product acid sequence assignments. In some embodiments, the LC-MS technique comprises a quantification technique.

### F3. Samples and Components Thereof

[0588] The methods provided herein are contemplated to be suitable for analyzing a diverse array of samples, such as any blood samples or derivatives thereof obtained using an absorbent or bibulous member, such as a blood spot card. In some embodiments, the sample is a blood sample, such as a whole blood sample. In some embodiments, the blood sample is processed, such as by the absorbent or bibulous member, e.g., a lateral flow dried blood collection device. In some embodiments, the blood sample is a plasma sample. In some embodiments, the blood sample is a serum sample.

[0589] The methods provided herein are particularly useful for the analysis of blood samples, or portion thereof, comprising a glycoprotein, such as to generate glycopeptide containing specimens for analysis with a mass spectrometer.

[0590] In some embodiments, the method comprises an upstream sample preparation technique, such as for obtaining plasma or serum from a blood sample, performed prior to methods for proteolytically digesting a sample. In some embodiments, the upstream sample preparation technique comprises a cell lysis step. In some embodiments, the upstream sample preparation technique comprises a filtration step. In some embodiments, the upstream sample preparation technique comprises a dilution step. In some embodiments, the upstream sample preparation technique comprises a protein concentration determination step.

[0591] In some embodiments, the sample is obtained from an individual. In some embodiments, the sample is obtained from a human individual.

### G3. Systems, Kits, and Compositions

[0592] In certain aspects, contemplated herein are systems, kits, and compositions useful for performing the methods described herein. In some embodiments, provided herein is a system, kit, and/or composition useful for performing a proteolytic digestion of a blood sample, or a portion thereof, comprising a glycoprotein as described herein. In some embodiments, provided herein is a system, kit, and/or composition useful for performing a LC-MS analysis of a proteolytic glycopeptide as described herein. In some embodiments, provided herein is a system, kit, and/or composition useful for performing a proteolytic digestion of a blood sample, or a portion thereof, comprising a glycoprotein followed by LC-MS analysis of the proteolytic glycopeptide produced therefrom.

[0593] The present invention is not intended to be limited in scope to the particular disclosed embodiments, which are provided, for example, to illustrate various aspects of the invention. Various modifications to the compositions and methods described will become apparent from the description and teachings herein. Such variations may be practiced without departing from the true scope and spirit of the disclosure and are intended to fall within the scope of the present disclosure.

### Section 4—Method of Diagnosing Pelvic Tumors

[0594] Provided herein are methods of diagnosing a pelvic tumor, such as ovarian cancer, based upon the presence, absence, or amount of one or more biomarkers. In some embodiments, the biomarker is a glycopeptide. In some embodiments, the method comprises performing mass spectrometry on a sample derived from blood. In some embodiments, the method comprises performing mass spectrometry (such as LC-MS) on a sample deposited on an absorbent or bibulous member (such as a blood spot card).

[0595] Provided herein, in certain aspects, is an absorbent or bibulous member, such as a blood spot card, comprising one or more extraction internal standards comprising at least one polypeptide standard deposited thereon prior to deposition of a blood sample. In other aspects, provided herein are one or more extraction internal standards comprising a polypeptide standard, including mixture of polypeptide standards, suitable for use in glycopolypeptide LC-MS analyses of samples obtained from an absorbent or bibulous member, such as a dried blood spot card. In other aspects, provided herein are methods for performing a liquid chromatography-mass spectrometry (LC-MS) analysis of a proteolytic glycopeptide derived from a blood sample deposited on an absorbent or bibulous member, such as a dried blood spot card, such as for the analysis of one or more biomarkers, e.g., biomarkers for the diagnosis of ovarian cancer. In other aspects, provided herein are one or more biomarkers for assessing ovarian cancer in an individual suitable for assessment of polypeptide content obtained from an absorbent or bibulous member, such as a blood spot card. The disclosure of the present application is based on the inventors' unique perspective and unexpected findings regarding the use of absorbent or bibulous members, such as blood spot cards, for the analysis of glycopolypeptides, such as proteolytic glycopeptides. As described herein, the inventors identified that the use of one or more extraction internal standards applied to an absorbent or bibulous member, such as a blood spot card, prior to deposition of a blood sample can facilitate analytical aspects of an LC-MS analysis of proteolytic peptides therefrom, such as one or more proteolytic glycopeptide. As described herein, the one or more extraction internal standards enable determination of any one or more of extraction efficiency, digestion efficiency, and a sample migration pattern such as to improve the analysis of polypeptide content, such as one or more proteolytic glycopeptides, extracted from an absorbent or bibulous member. Specifically, as described herein, it was unexpectedly found that the taught methods involving absorbent or bibulous members, such as blood spot cards, and one or more extraction internal standards enable performance of an ovarian cancer biomarker screen to accurately and reliably determine the presence of benign or non-benign ovarian cancer. Such results obtained using biomarkers useful for the techniques involving absorbent or bibulous member samples described herein were in agreement with a biomarkers for an established liquid blood-based assay. Furthermore, using the methods of performing a LC-MS analysis involving the absorbent or bibulous members described herein, the inventors identified one or more biomarkers useful for assessing ovarian cancer in an individual. In addition to the significant advantages provided by the subject matter described herein that enable LC-MS analysis of polypeptide content, such as one or more proteolytic glycopeptides, the subject matter provided herein benefits from the use of dried blood sample, e.g., reduced risk of live blood biohazards, inhibition of enzymatic activity (e.g., proteases and glycotransferases), ease of obtaining a blood sample from an individual (including the small amount of blood sample required), and ease of transportation of a blood sample from the site of obtaining to a site of analysis.

[0596] Thus, in some aspects, provided herein is a method for performing a liquid chromatography-mass spectrometry (LC-MS) analysis of a proteolytic glycopeptide derived from a blood sample deposited on a delimited zone of an absorbent or bibulous member, wherein the blood sample comprises a plurality of polypeptides comprising at least one glycoprotein, the method comprising extracting at least a portion of the plurality of polypeptides and one or more extraction internal standards from the absorbent or bibulous member to obtain an extracted sample, wherein the absorbent or bibulous member comprises the one or more extraction internal standards prior to deposition of the blood sample within the delimited zone, and wherein at least one of the one or more extraction internal standards comprises a polypeptide standard; subjecting the extracted sample or a derivative thereof to a proteolytic digestion technique to produce a proteolytically digested sample comprising the proteolytic glycopeptide; introducing at least a portion of the proteolytically digested sample to a liquid chromatography (LC) system of a LC-MS system; and performing the LC-MS analysis on at least the proteolytic glycopeptide and the one or more extraction internal standards.

[0597] In other aspects, provided herein is a method for performing a liquid chromatography-mass spectrometry (LC-MS) analysis of a proteolytic glycopeptide derived from a blood sample from an individual deposited on a delimited zone of an absorbent or bibulous member, the method comprising obtaining an absorbent or bibulous member comprising a blood sample from the individual deposited thereon, wherein the absorbent or bibulous member comprises one or more extraction internal standards deposited and dried prior to deposition of the blood sample on the absorbent or bibulous member, and wherein the absorbent or bibulous member comprising the blood sample contains at least a portion of the blood sample and the one or more extraction internal standards in an overlapping area of the absorbent or bibulous member; extracting at least a portion of the plurality of polypeptides and the one or more extraction internal standards from the absorbent or bibulous member to obtain an extracted sample; subjecting the extracted sample or a derivative thereof to a proteolytic digestion technique to produce a proteolytically digested sample comprising the proteolytic glycopeptide; introducing at least a portion of the proteolytically digested sample to a liquid chromatography (LC) system of a LC-MS system; and performing an LC-MS analysis to quantify one or more biomarkers of ovarian cancer and the one or more extraction internal standards, and wherein at least one of the one or more biomarkers is a glycopeptide.

[0598] In other aspects, provided herein is an absorbent or bibulous member, such as a blood spot card, comprising one or more extraction internal standard, wherein the one or more extraction internal standards comprises at least one polypeptide standard, and wherein the blood spot card does not comprise a blood sample deposited thereon. In some embodiments, the one or more extraction standards are deposited on the absorbent or bibulous member, such as a blood spot card, in a delimited zone, such as where a blood sample is deposited.

B4. Example Mass Spectrometry and Sample Preparation Workflow with DBS

[0599] For purposes of orientation and illustration of the description herein, provided in this section are example aspects of sample preparation and mass spectrometry workflows (FIGS. 1A-1C) for analyzing the composition of a peptide and/or glycopeptide using a mass spectrometer. Subsequent sections are provided with more details regarding certain inventive features related to methods for proteolytically digesting a biological sample, such as a blood sample, comprising a glycoprotein, methods of performing a LC-MS analysis of a proteolytic glycopeptide, and mass spectrometry workflows involving any combination of elements thereof.

[0600] FIG. 1A is a schematic of an example workflow 100 for a peptide structure analysis, including of glycopeptides. The workflow 100 may include various operations including, for example, sample collection 102 using an absorbent or bibulous member, such as a blood spot card, sample intake 104, sample preparation and mass spectrometry processing 106, and data analysis 108.

[0601] Sample collection 102 may include, for example, obtaining a biological sample, such as a blood sample, 112 from an individual 114. Relevant to the methodology described herein, a biological sample 112 may take the form of a blood sample obtained via one or more sampling methods, such as a finger prick produced using a lancet, and deposited on an absorbent or bibulous member, such as a blood spot card. In some embodiments, many aliquots of the biological sample 112 are obtained 118, such as via deposition of a blood sample from an individual onto a plurality of absorbent or bibulous members or a plurality of blood deposition sites on an absorbent or bibulous member, such as a blood spot card. In some embodiments, the absorbent or bibulous members performs a separation of the blood sample from the individual, such as to produce a serum sample, a plasma sample, and/or extraction of a blood cell (e.g., white blood cell (WBC), red blood cell (RBC) sample. In some embodiments, the biological sample, such as the blood sample, 112 may include nucleotides (e.g., ssDNA, dsDNA, RNA), organelles, amino acids, peptides, proteins, carbohydrates, glycoproteins, or any combination thereof.

[0602] Sample intake 104 may include one or more various operations such as, for example, aliquoting, labeling, registering, processing, storing, thawing, and/or other types of operations involved with preparing a sample for sample preparation and mass spectrometry processing. In some embodiments, sample intake 104 comprises separating one or portions of an absorbent or bibulous member, such as punching one or more chads out of a blood spot card with a hole punching device.

[0603] Sample preparation and mass spectrometry processing 106 may include, for example, one or more operations to form set of peptide structures 122, such as a proteolytic peptide and/or a proteolytic glycopeptide. In some embodiments, the sample preparation comprises extracting one or more polypeptides from an absorbent or bibulous member, such as a blood spot card, or a portion thereof with an extraction buffer. In some embodiments, the extracted polypeptide content is further processed, such as via subjecting to a precipitation technique. In some embodiments, the sample preparation includes subjecting a blood sample, or a portion thereof, to a proteolytic digestion. Mass spectrometry processing 124 may include, for example, liquid chromatography, introducing species from the sample, and/or derived therefrom, to a mass spectrometer, and data acquisition, such as using a multiple reaction monitoring (MRM) technique. MRM is a mass spectrometry method in which a precursor ion of a particular m/z value, including window thereof, (e.g., peptide analyte) is selected in the first quadrupole (Q1) and transmitted to the second quadrupole (Q2) for fragmentation. The resulting product ions are then transmitted to the third quadrupole (Q3), which detects only product ions with selected predefined m/z values. In some embodiments, the predefined m/z value, including window thereof, selected in the first quadrupole and a predefined m/z value, including window thereof, may be expressed as a MRM transition. Dynamic MRM (dMRM) is a variant of MRM. In dynamic MRM mode, MRM transition lists are scheduled throughout an LC/MS run based on the retention time window for each analyte. In this way, analytes are only monitored while they are eluting from the LC and therefore the MS scan time is not wasted by monitoring the analytes when they are not expected.

### C4. Absorbent or Bibulous Members and Methods of Use Thereof

[0604] Provided herein, in certain aspects, are absorbent or bibulous members, such as a blood spot card or a lateral flow blood sample device, comprising one or more extraction internal standards, wherein at least one of the one or more extraction internal standards is a polypeptide standard. The absorbent or bibulous member and extraction internal standards, including methods associated therewith, are described in more detail below. The modular discussion of these features of the application is not intended to limit the scope of the description provided herein, and one of ordinary skill in the art will readily appreciate that various features can be combined.

### I. Absorbent or Bibulous Members

[0605] The absorbent or bibulous members encompassed herein may take many forms and, in some embodiments, perform one or more blood sample processing functions. Generally speaking, the absorbent or bibulous members described herein serve as a platform to accept a blood sample, or a derivative thereof, from an individual, wherein the blood sample, or the derivative thereof, can dry on or within the absorbent or bibulous member. Subsequently, the absorbent or bibulous member comprising a blood sample can be processed, e.g., shipped to a laboratory or subjected to an extraction technique. The absorbent or bibulous members described herein enhance the stability of analytes at ambient or elevated environmental temperatures (such as by inhibiting enzymatic activity in whole blood) and simplify the transportation of sample by avoiding the need for a cold chain. Blood spot cards are well known in the art, e.g., see U.S. Pat. Nos. 3,838,012; 9,198,609; and 10,422,729, which are hereby incorporated herein by reference in their entirety.

[0606] In some embodiments, the absorbent or bibulous member is a blood spot card. In some embodiments, the blood spot card comprises a porous material or a mesh material on which a blood sample, or portion thereof, is deposited and/or received. In some embodiments, the blood spot card comprises a filter paper material, such as an absorbent filter paper. In some embodiments, the filter paper material comprises a cellulose-based paper. In some embodiments, the filter paper material does not bind polypeptide content in a manner such that said polypeptide content cannot be later extracted from the filter paper material. In some embodiments the filter paper material prevents or reduces sample hemolysis. In some embodiments, the filter paper material is Watman paper. In some embodiments, the blood spot card is a Whatman 903 Proteinsaver card.

[0607] In some embodiments, the absorbent or bibulous member is a blood spot card comprising one or more delimited zones configured to guide placement of a blood sample. Such delimited zones may be any shape or size, and have any placement on the blood spot card. In some embodiments, the delimited zone has a surface area of about 100 mm² to about 1,000 mm², such as about any of 150 mm², 200 mm², 250 mm², 300 mm², 350 mm², 400 mm², 450 mm², 500 mm², 600 mm², 700 mm², 800 mm², or 900 mm². In some embodiments, the delimited zone has a surface area of about 1,000 mm² or less, such as about any of 900 mm² or less, 800 mm² or less, 700 mm² or less, 600 mm² or less, 500 mm² or less, 450 mm² or less, 400 mm² or less, 350 mm² or less, 300 mm² or less, 250 mm² or less, 200 mm² or less, 150 mm² or less, or 100 mm² or less. In some embodiments, the delimited zone forms a circle. In some embodiments, the delimited zone is marked, such as visible to the naked eye, but a line or a portion thereof, such as a dashed line. In some embodiments, the blood spot card comprises one or more additional markings, such as identifying information.

[0608] FIG. 14A provides an example blood spot card 1400 having three delimited zones 1404, 1406, 1408. The blood spot card 1400 comprises a filter paper material 1402. The delimited zones 1404, 1406, 1408 are marked by dashed line circles and direct the placement of a blood sample. The blood spot card 1400 further comprises a marking 1410 for the identification of the sample.

[0609] In some embodiments, the blood spot card is a patterned blood spot card comprising a feature to control the area of the card exposed to a blood sample. In some embodiments, the patterned blood spot card comprises a hydrophobic material, such as a wax, to control the area of the card exposed to a blood sample.

[0610] In some embodiments, the blood spot card further comprises one or more extraction internal standards, wherein at least one of the extraction internal standards comprises a polypeptide standard. The extraction internal standards may be placed in a variety of configurations on the blood spot card such that once the blood sample is applied and allowed to dry, a portion of the blood spot card can be separated, such as by punching a chad from the blood spot card, the portion of the blood spot card comprising at least a portion of the blood sample and the one or more extraction internal standards. In some embodiments, the one or more extraction internal standards are deposited in a delimited zone of the blood spot card such that the one or more extraction internal standards are dried on the blood spot card prior to deposition of a blood sample. In some embodiments, the one or more extraction internal standards are deposited in a substantially uniform manner within the delimited zone. In some embodiments, the one or more extraction internal standards are deposited in a patterned manner within the delimited zone. In some embodiments, the delimited zone of a blood spot card comprises a known concentration of one or more extraction internal standards. In some embodiments, the method described herein comprise determining the total amount of a blood sample component and/or one or more extraction internal standards deposited on an absorbent or bibulous member, such as a blood spot card, based on the size of the one or more chads used to obtain polypeptide content for LC-MS analysis (e.g., a correction factor based on the size of the one or more chads and the size of a delimited area comprising a blood sample (or a portion thereof) and one or more extraction internal standards.

[0611] In some embodiments, the absorbent or bibulous member comprises a lateral flow element useful for performing a blood sample processing step. In some embodiments, the absorbent or bibulous member comprising a lateral flow element comprises (a) a delimited zone for deposition of a blood sample, and (b) a lateral flow element. In some embodiments, the absorbent or bibulous member comprises a zone, such as a delimited zone, wherein the component of the blood sample, such as a plasma or serum sample is obtained and allowed to dry thereon. In some embodiments, the zone comprising the plasma or serum sample is a portion of the lateral flow element.

[0612] FIG. 14B provides an example absorbent or bibulous member comprising a lateral flow element 1450. The absorbent or bibulous member 1400 comprises a delimited zone 1452 for deposition of a blood sample operably connected with a lateral flow zone 1454 configured for separation of one or more components of the blood sample. The absorbent or bibulous member 350 comprises a zone 1456 wherein the desired separated blood component can be obtained therefrom, e.g., a zone where a plasma or serum sample is dried thereon. The zone 1456 can be distal from and/or spaced apart from the delimited zone 1452. The absorbent or bibulous member 1450 further comprises a marking 1460 for the identification of the sample.

[0613] In some embodiments, the absorbent or bibulous member comprising a lateral flow element further comprises one or more extraction internal standards, wherein at least one of the extraction internal standards comprises a polypeptide standard. The extraction internal standards may be placed in a variety of configurations on the absorbent or bibulous member comprising a lateral flow element such that once the blood sample is applied and allowed to be processed and dry, a portion of the absorbent or bibulous member can be separated, such as by punching a chad from the absorbent or bibulous member, the portion of the absorbent or bibulous member comprising at least a portion of the blood sample and the one or more extraction internal standards. In some embodiments, the one or more extraction internal standards are deposited on a delimited zone configured for deposition of a blood sample. In some embodiments, the one or more extraction internal standards are deposited on a lateral flow element configured for processing a blood sample. In some embodiments, the one or more extraction internal standards are deposited on a zone configured for receipt of a component of a blood sample, such as a plasma or serum sample. Various combinations of the placement of the one or more extraction internal standards are encompassed by the description provided herein. In some embodiments, the absorbent or bibulous member comprising a lateral flow element comprises a plurality of populations of the one or more extraction internal standards, wherein the populations may of the extraction internal standards may be distinguished from one another (e.g., contain different polypeptide standards). In some embodiments, at least one population provides distinct information as compared to another population. For example, in some embodiments, the absorbent or bibulous member comprising a lateral flow element comprises a first population of the one or more extraction internal standards deposited on a delimited zone configured for deposition of a blood sample, wherein such population is useful for assessing sample migration to the zone for receipt of the processed sample. In some embodiments, the absorbent or bibulous member comprises a lateral flow element configured to separate whole blood into a portion of plasma, wherein the whole blood is deposited at the delimited zone and then a liquid portion of the whole blood laterally flows from the delimited zone to a distal zone, wherein the distal zone contains the portion of the plasma.

[0614] In some embodiments, the absorbent or bibulous member, including a single delimited zone of the absorbent or bibulous member, is configured to accept a blood sample having a volume of about 250 μL or less, such as about any of 225 μL or less, 200 μL or less, 175 μL or less, 150 μL or less, 125 μL or less, 100 μL or less, 75 μL or less, 50 μL or less, or 25 μL or less. In some embodiments, the absorbent or bibulous member, including a single delimited zone of the absorbent or bibulous member, is configured to accept a blood sample having a volume of about any of 250 μL, 225 μL, 200 μL, 175 μL, 150 μL, 125 μL, 100 μL, 75 μL, 50 μL, or 25 μL. In some embodiments, the absorbent or bibulous member, including a single delimited zone of the absorbent or bibulous member, is configured to accept a blood sample obtained from lancet of an individual, such as from a finger prick or a heel prick. In some embodiments, the absorbent or bibulous member comprises 1 to 10 delimited zoned configured for deposition of a blood sample. In some embodiments, the absorbent or bibulous member comprises 1 to 10 delimited zoned configured for deposition of a blood sample, wherein each delimited zone is configured to accept a blood sample having a volume of about 250 μL or less.

### II. Extraction Internal Standards and Uses Thereof

[0615] In certain aspects, provided herein are extraction internal standards suitable for use with the absorbent or bibulous members, such as a blood spot card, and methodology described herein. In some embodiments, provided is one or more extraction internal standards, wherein at least one of the one or more extraction internal standards comprises a polypeptide standard. In some embodiments, all of the one or more extraction internal standards are polypeptide standards. In some embodiments, a single extraction internal standard is used in the compositions and methods described herein, wherein the extraction internal standard is a polypeptide standard. In some embodiments, a plurality of extraction internal standards are used in the compositions and methods described herein, wherein at least one of the extraction internal standards is a polypeptide standard. As described herein, the polypeptide standards have a known composition, known amount, and known location on the absorbent or bibulous member (e.g., prior to deposition of a blood sample) such that the polypeptide standard serves as a reference point for one or more processes involved with analyzing the components of the blood sample using an LC-MS technique. In some embodiments, the polypeptide standard having a known location will move, such as due to placement of a blood sample on an absorbent or bibulous member. For example, as described in more detail herein, in the some embodiments, the polypeptide standard is useful for determining one or more of an extraction efficiency, a digestion efficiency, a sample migration pattern, or quantification of a polypeptide.

[0616] In some embodiments, the one or more extraction internal standards comprise a plurality of polypeptide standards, wherein at least two polypeptide standards of the plurality have different amino acid lengths. In some embodiments, the at least two polypeptide standards of the plurality are different in length by 1 or more amino acid, such as any of 5 or more, 10 or more, 20 or more, 30 or more, 40 or more, 50 or more, 60 or more, 70 or more, 80 or more, 90 or more, 100 or more, 150 or more, 200 or more, 250 or more, 300 or more, 400 or more, 500 or more, 600 or more, 700 or more, 800 or more, 900 or more, 1000 or more, 1100 or more, 1200 or more, 1300 or more, 1400 or more, 15000 or more, 1600 or more, 1700 or more, 1800 or more, 1900 or more, or 2000 or more amino acids. In some embodiments, the at least two polypeptide standards of the plurality are different in length by about any of 1, 5, 10, 20, 30, 40, 50, 60, 70, 80, 90, 100, 150, 200, 250, 300, 400, 500, 600, 700, 800, 900, 1000, 1100, 1200, 1300, 1400, 15000, 1600, 1700, 1800, 1900, or 2000 amino acids.

[0617] In some embodiments, the polypeptide standard has an amino acid length of at least about 4 amino acids to about 200 amino acids, such as any of about 5 amino acids to about 1900 amino acids, about 10 amino acids to about 1800 amino acids, about 20 amino acids to about 1700 amino acids, about 30 amino acids to about 1600 amino acids, about 40 amino acids to about 1500 amino acids, about 50 amino acids to about 1400 amino acids, about 60 amino acids to about 1300 amino acids, about 70 amino acids to about 1200 amino acids, about 80 amino acids to about 1100 amino acids, about 90 amino acids to about 1000 amino acids, about 100 amino acids to about 900 amino acids, about 200 amino acids to about 800 amino acids, about 300 amino acids to about 700 amino acids, about 400 amino acids to about 600 amino acids, or about 500 amino acids to about 750 amino acids. In some embodiments, the polypeptide standard has an amino acid length of at least about 4 amino acids, such as at least about any of 10 amino acids, 20 amino acids, 30 amino acids, 40 amino acids, 50 amino acids, 75 amino acids, 100 amino acids, 150 amino acids, 200 amino acids, 250 amino acids, 300 amino acids, 350 amino acids, 400 amino acids, 450 amino acids, 500 amino acids, 550 amino acids, 600 amino acids, 650 amino acids, 700 amino acids, 750 amino acids, 800 amino acids, 850 amino acids, 900 amino acids, 950 amino acids, 1000 amino acids, 1100 amino acids, 1200 amino acids, 1300 amino acids, 1400 amino acids, 1500 amino acids, 1600 amino acids, 1700 amino acids, 1800 amino acids, 1900 amino acids, or 2000 amino acids.

[0618] In some embodiments, at least one polypeptide standard of the one or more extraction internal standards comprises at least one internal enzymatic cleavage site, such as a cleavage site for trypsin or LysC. In some embodiments, the internal enzymatic cleavage site of the at least one polypeptide standard is cleaved during the provided method, resulting in two or more polypeptide fragments, wherein the two or more polypeptide fragments are shorter than the uncleaved polypeptide standard. In some embodiments, the cleaved polypeptide fragments comprise a C-terminal arginine or lysine. In some embodiments, the at least one polypeptide standard comprises a polypeptide comprising a C-terminal arginine or lysine.

[0619] In some embodiments, the one or more extraction internal standards comprise a plurality of polypeptide standards, wherein at least two of the plurality of polypeptide standards have different net hydrophobicities. In some embodiments, the net hydrophobicity is based on a partition coefficient analysis. In some embodiments, the net hydrophobicity is based on an octanol and water partition coefficient. In some embodiments, the net hydrophobicity is based on a computational tool. In some embodiments, the plurality of polypeptide standards having different net hydrophobicities comprises a hydrophobicity range. In some embodiments, the plurality of polypeptide standards comprise a hydrophobicity range as defined by the Grand average of hydropathicity index (GRAVY). In some embodiments, a hydrophobicity range as defined by GRAVY is about −0.5 to about 1. In some embodiments, a hydrophobicity range as defined by GRAVY is about −1 to about 2, about −0.8 to about 1.8, about −0.6 to about 1.6, about −0.4 to about 1.4, about −0.2 to about 1.2, about 0 to about 1, about 0.2 to about 0.8, about 0.4 to about 0.6, or about 0.5 to about 0.9. In some embodiments, a hydrophobicity range as defined by GRAVY is −1 to 2, −0.8 to 1.8, −0.6 to 1.6, −0.4 to 1.4, −0.2 to 1.2, 0 to 1, 0.2 to 0.8, 0.4 to 0.6, or 0.5 to 0.9. In some embodiments, a hydrophobicity range as defined by GRAVY is −0.5 to 1.

[0620] In some embodiments, the at least one polypeptide standard of the one or more extraction internal standards comprises a sequence that is non-homologous to an endogenous polypeptide of an individual from which the blood sample originates. In some embodiments, the at least one polypeptide standard comprises an amino acid sequence that does not have homology to a peptide derived from the human proteome. In some embodiments, the at least one polypeptide standard comprises an amino acid sequence derived from a bacterial, a fungal, an insect, a plant, or a non-human animal proteome. In some embodiments, the at least one polypeptide standard comprises an amino acid sequence of unknown origin (e.g., a sequence not found in known organisms or exogenous).

[0621] In some embodiments, the at least one polypeptide standard of the one or more extraction internal standards is a synthetic polypeptide. In some embodiments, the synthetic peptide is one or more of SEQ ID NOs: 21 and 22. In some embodiments, the at least one polypeptide standard comprises a sequence that is an analog of an endogenous polypeptide of an individual from which the blood sample originates. In some embodiments, the at least one polypeptide standard comprises an unnatural amino acid. In some embodiments, the unnatural amino acid comprises a fluorescent moiety, a functional moiety, and/or a reactive moiety.

[0622] In some embodiments, the at least one polypeptide standard of the one or more extraction internal standards is a synthetic polypeptide, wherein the at least one polypeptide standard comprises a stable heavy isotope label. In some embodiments, the stable heavy isotope label of the at least one polypeptide standard comprises one or more heavy labeled arginine, lysine, leucine, valine, or a combination thereof. In some embodiments, the stable heavy isotope label of the at least one polypeptide standard comprises 2-plex labeling, 3-plex labeling, or higher multiplex labeling. In some embodiments, the stable heavy isotope label of the at least one polypeptide standard is produced using stable isotope labeling by amino acids in cell culture (SILAC). In some embodiments, the analog of the endogenous polypeptide is a stable heavy isotope labeled analog polypeptide. In some embodiments, the non-homologous polypeptide is a stable heavy isotope labeled non-homologous polypeptide. In some embodiments, the non-human polypeptide is a stable heavy isotope labeled non-human polypeptide.

[0623] In some embodiments, the at least one polypeptide standard of the one or more extraction internal standards is a recombinantly expressed polypeptide. In some embodiments, the recombinantly expressed polypeptide comprises an amino acid sequence range from about 4 amino acids to about 2000 amino acids, about 5 amino acids to about 1900 amino acids, about 10 amino acids to about 1800 amino acids, about 20 amino acids to about 1700 amino acids, about 30 amino acids to about 1600 amino acids, about 40 amino acids to about 1500 amino acids, about 50 amino acids to about 1400 amino acids, about 60 amino acids to about 1300 amino acids, about 70 amino acids to about 1200 amino acids, about 80 amino acids to about 1100 amino acids, about 90 amino acids to about 1000 amino acids, about 100 amino acids to about 900 amino acids, about 200 amino acids to about 800 amino acids, about 300 amino acids to about 700 amino acids, about 400 amino acids to about 600 amino acids, or about 500 amino acids to about 750 amino acids. In some embodiments, the recombinantly expressed polypeptide comprises at least one internal enzymatic cleavage site. In some embodiments, the recombinantly expressed polypeptide of the one or more extraction internal standards have different net hydrophobicities. In some embodiments, the recombinantly expressed polypeptide comprises a sequence that is non-homologous to an endogenous polypeptide of an individual from which the blood sample originates. In some embodiments, the recombinantly expressed polypeptide comprises a sequence that does not have homology to a peptide derived from the human proteome. In some embodiments, the recombinantly expressed polypeptide comprises an analog sequence, wherein one or more amino acids are unnatural or derivatives of the endogenous sequence. In some embodiments, the recombinantly expressed polypeptide is a synthetic polypeptide. In some embodiments, the recombinantly expressed polypeptide comprises a stable heavy isotope label.

[0624] In some embodiments, the at least one polypeptide standard of the one or more extraction internal standards is a glycopolypeptide. In some embodiments, the glycopolypeptide comprises an amino acid sequence range from about 4 amino acids to about 2000 amino acids, about 5 amino acids to about 1900 amino acids, about 10 amino acids to about 1800 amino acids, about 20 amino acids to about 1700 amino acids, about 30 amino acids to about 1600 amino acids, about 40 amino acids to about 1500 amino acids, about 50 amino acids to about 1400 amino acids, about 60 amino acids to about 1300 amino acids, about 70 amino acids to about 1200 amino acids, about 80 amino acids to about 1100 amino acids, about 90 amino acids to about 1000 amino acids, about 100 amino acids to about 900 amino acids, about 200 amino acids to about 800 amino acids, about 300 amino acids to about 700 amino acids, about 400 amino acids to about 600 amino acids, or about 500 amino acids to about 750 amino acids. In some embodiments, the glycopolypeptide comprises at least one internal enzymatic cleavage site. In some embodiments, the glycopolypeptide of the one or more extraction internal standards have different net hydrophobicities. In some embodiments, the glycopolypeptide comprises a sequence that is non-homologous to an endogenous polypeptide of an individual from which the blood sample originates. In some embodiments, the glycopolypeptide comprises a sequence that does not have homology to a peptide derived from the human proteome. In some embodiments, the glycopolypeptide comprises an analog sequence, wherein one or more amino acids are unnatural or derivatives of the endogenous sequence. In some embodiments, the glycopolypeptide is a synthetic polypeptide. In some embodiments, the glycopolypeptide comprises a stable heavy isotope label.

[0625] In some embodiments, the at least one polypeptide standard of the one or more extraction internal standards is a polypeptide that does not substantially interact with hemoglobin. In some embodiments, hemoglobin does not substantially impact the extraction of the polypeptide. In some embodiments, hemoglobin does not substantially impact the processing of the polypeptide. In some embodiments, hemoglobin does not substantially impact the digestion of the polypeptide.

[0626] In some embodiments, the at least one polypeptide standard of the one or more extraction internal standards comprises a contiguous sequence from SEQ ID NOs: 14-20. In some embodiments, the at least one polypeptide standard of the one or more extraction internal standards comprises at least a contiguous 4 amino acid sequence from SEQ ID NOs: 14-20. In some embodiments, the at least one polypeptide standard of the one or more extraction internal standards comprises at least a contiguous sequence of about 4, about 5, about 6, about 7, about 8, about 9, about 10, about 11, about 12, about 13, about 14, about 15, about 16, about 17, about 18, about 19, about 20, about 30, about 40, about 50, about 60, about 70, about 80, about 90, or about 100 acids from SEQ ID NOs: 14-20. In some embodiments, the at least one polypeptide standard of the one or more extraction internal standards comprises one or more polypeptides human apolipoprotein C-III (APOC3) of SEQ ID NO: 14, human alpha-2-macroglobulin (A2MG) of SEQ ID NO: 15, human ceruloplasmin (CERU) of SEQ ID NO: 16, human alpha-1-acid glycoprotein 1 (AGP1) of SEQ ID NO: 17, human haptoglobin (HPT) of SEQ ID NO: 18, human hemopexin (HEMO) of SEQ ID NO: 19, or human beta-2-glycoprotein 1 (APOH) of SEQ ID NO: 20. In some embodiments, the at least one polypeptide standard of the one or more extraction internal standards is APOC3, for example SEQ ID NO: 14. In some embodiments, the at least one polypeptide standard of the one or more extraction internal standards is A2MG, for example SEQ ID NO: 215 In some embodiments, the at least one polypeptide standard of the one or more extraction internal standards is CERU, for example SEQ ID NO: 16. In some embodiments, the at least one polypeptide standard of the one or more extraction internal standards is AGP1, for example SEQ ID NO: 17. In some embodiments, the at least one polypeptide standard of the one or more extraction internal standards is HPT, for example SEQ ID NO: 18. In some embodiments, the at least one polypeptide standard of the one or more extraction internal standards is HEMO, for example SEQ ID NO: 19. In some embodiments, the at least one polypeptide standard of the one or more extraction internal standards is APOH, for example SEQ ID NO: 20. In some embodiments, the at least one polypeptide standard of the one or more extraction internal standards has at least 85%, at least 90%, at least 95%, at least 96%, at least 97%, at least 98%, or at least 99% sequence identity to one or more of SEQ ID NOs: 14-20. In some embodiments, the at least one polypeptide standard of the one or more extraction internal standards has 85%, 86%, 87%, 88%, 89%, 90%, 91%, 92%, 93%, 94%, 95%, 96%, 97%, 98%, or 99% sequence identity to one or more of SEQ ID NOs: 14-20. In some embodiments, the at least one polypeptide standard of the one or more extraction internal standards is any of the polypeptides described herein, wherein the polypeptide further comprises one or more of an amino acid sequence range from about 4 amino acids to about 2000 amino acids, at least one internal enzymatic cleavage site, a unique net hydrophobicity, a sequence that is non-homologous to an endogenous polypeptide of an individual from which the blood sample originates, a sequence that does not have homology to a peptide derived from the human proteome, an analog sequence, wherein one or more amino acids are unnatural or derivatives of the endogenous sequence, a stable heavy isotope label, a polypeptide that does not substantially interact with hemoglobin, a recombinantly expressed polypeptide, or a glycopolypeptide. In an embodiment, the proteins of SEQ ID NOs: 14-20 are heavy labeled proteins where all arginines and lysines are replaced with stable isotope labeled lysine and arginine. The proteins are labeled with a stable isotopes so that they can be monitored without confusing them for the endogenous proteins in the blood sample. Such heavy labeled glycoproteins could be produced through recombinant expression in an orthologous system, cultured in SILAC supplemented media. In an embodiment, the proteins of SEQ ID NOs: 14-20 have all of their lysines and arginines heavy isotope labeled and deposited on a filter card. When blood is applied, a portion of the labeled proteins of SEQ ID NOs: 14-20 is extracted from the filter paper or DBS and then digested with a proteolytic enzyme. A resulting peptide produced from the enzymatic digestion having the isotope label from each of the proteins of SEQ ID NOs: 14-20 can be monitored with multiple reaction monitoring (MRM) for determining the extraction efficiency and/or tryptic efficiency for each of the labeled proteins. Assuming that the proteins of SEQ ID NOS: 14-20 are efficiently digested, they can be used to determine the extraction efficiency. Alternatively, if the proteins of SEQ ID NOS: 14-20 are not completely digested, then it can be assumed that the digestion efficiency of the proteins of SEQ ID NOS: 14-20 are the same as the proteins in the sample allowing the proteins of SEQ ID NOS: 14-20 to be used for determining the extraction efficiency. The labeled isotope allows the tryptic peptides generated from the proteins of SEQ ID NOs: 14-20 to be distinguished from naturally occurring tryptic peptides. In an embodiment, peptides of SEQ ID NOs: 21 and 22 can represent an exogenous or non-human peptide not normally found in human subjects and be deposited on a filter paper or DBS. Since SEQ ID NOs: 21 and 22 are not normally found in human subjects, they can be used for determining the extraction efficiency. The peptides of SEQ ID NOS: 21 and 22 are smaller molecules than the proteins of SEQ ID NOS: 14-20 causing the peptides of SEQ ID NOS: 21 and 22 to potentially have less variations in extraction efficiency from the dried blood spot than the proteins of SEQ ID NOS: 14-20.

TABLE 13
Sources of example polypeptide standards

| SEQ | | |
|---|---|---|
| ID | | |
| NO | Sequence | Origin |
| 14 | MQPRVLLVVALLALLASARASEAEDASLLSFMQGY | Human |
| | MKHATKTAKDALSSVQESQVAQQARGWVTDGFSSL | Apolipoprotein |
| | KDYWSTVKDKFSEFWDLDPEVRPTSAVAA | C-III |
| | | (APOC3) |
| 15 | MGKNKLLHPSLVLLLLVLLPTDASVSGKPQYMVLV | Human |
| | PSLLHTETTEKGCVLLSYLNETVTVSASLESVRGN | Alpha-2 |
| | RSLFTDLEAENDVLHCVAFAVPKSSSNEEVMFLTV | macroglobulin |
| | QVKGPTQEFKKRTTVMVKNEDSLVFVQTDKSIYKP | (A2MG) |
| | GQTVKFRVVSMDENFHPLNELIPLVYIQDPKGNRI | |
| | AQWQSFQLEGGLKQFSFPLSSEPFQGSYKVVVQKK | |
| | SGGRTEHPFTVEEFVLPKFEVQVTVPKIITILEEE | |
| | MNVSVCGLYTYGKPVPGHVTVSICRKYSDASDCHG | |
| | EDSQAFCEKFSGQLNSHGCFYQQVKTKVFQLKRKE | |
| | YEMKLHTEAQIQEEGTVVELTGRQSSEITRTITKL | |
| | SFVKVDSHFRQGIPFFGQVRLVDGKGVPIPNKVIF | |
| | IRGNEANYYSNATTDEHGLVQFSINTTNVMGTSLT | |
| | VRVNYKDRSPCYGYQWVSEEHEEAHHTAYLVFSPS | |
| | KSFVHLEPMSHELPCGHTQTVQAHYILNGGTLLGL | |
| | KKLSFYYLIMAKGGIVRTGTHGLLVKQEDMKGHFS | |
| | ISIPVKSDIAPVARLLIYAVLPTGDVIGDSAKYDV | |
| | ENCLANKVDLSFSPSQSLPASHAHLRVTAAPQSVC | |
| | ALRAVDQSVLLMKPDAELSASSVYNLLPEKDLTGF | |
| | PGPLNDQDNEDCINRHNVYINGITYTPVSSTNEKD | |
| | MYSFLEDMGLKAFTNSKIRKPKMCPQLQQYEMHGP | |
| | EGLRVGFYESDVMGRGHARLVHVEEPHTETVRKYF | |
| | PETWIWDLVVVNSAGVAEVGVTVPDTITEWKAGAF | |
| | CLSEDAGLGISSTASLRAFQPFFVELTMPYSVIRG | |
| | EAFTLKATVLNYLPKCIRVSVQLEASPAFLAVPVE | |
| | KEQAPHCICANGRQTVSWAVTPKSLGNVNFTVSAE | |
| | ALESQELCGTEVPSVPEHGRKDTVIKPLLVEPEGL | |
| | EKETTFNSLLCPSGGEVSEELSLKLPPNVVEESAR | |
| | ASVSVLGDILGSAMQNTQNLLQMPYGCGEQNMVLF | |
| | APNIYVLDYLNETQQLTPEIKSKAIGYLNTGYQRQ | |
| | LNYKHYDGSYSTFGERYGRNQGNTWLTAFVLKTFA | |
| | QARAYIFIDEAHITQALIWLSQRQKDNGCFRSSGS | |
| | LLNNAIKGGVEDEVTLSAYITIALLEIPLTVTHPV | |
| | VRNALFCLESAWKTAQEGDHGSHVYTKALLAYAFA | |
| | LAGNQDKRKEVLKSLNEEAVKKDNSVHWERPQKPK | |
| | APVGHFYEPQAPSAEVEMTSYVLLAYLTAQPAPTS | |
| | EDLTSATNIVKWITKQQNAQGGFSSTQDTVVALHA | |
| | LSKYGAATFTRTGKAAQVTIQSSGTFSSKFQVDNN | |
| | NRLLLQQVSLPELPGEYSMKVTGEGCVYLQTSLKY | |
| | NILPEKEEFPFALGVQTLPQTCDEPKAHTSFQISL | |
| | SVSYTGSRSASNMAIVDVKMVSGFIPLKPTVKMLE | |
| | RSNHVSRTEVSSNHVLIYLDKVSNQTLSLFFTVLQ | |
| | DVPVRDLKPAIVKVYDYYETDEFAIAEYNAPCSKD | |
| | LGNA | |
| 16 | MKILILGIFLFLCSTPAWAKEKHYYIGIIETTWDY | Human |
| | ASDHGEKKLISVDTEHSNIYLQNGPDRIGRLYKKA | ceruloplasmin |
| | LYLQYTDETFRTTIEKPVWLGFLGPIIKAETGDKV | (CERU) |
| | YVHLKNLASRPYTFHSHGITYYKEHEGAIYPDNTT | |
| | DFQRADDKVYPGEQYTYMLLATEEQSPGEGDGNCV | |
| | TRIYHSHIDAPKDIASGLIGPLIICKKDSLDKEKE | |
| | KHIDREFVVMFSVVDENFSWYLEDNIKTYCSEPEK | |
| | VDKDNEDFQESNRMYSVNGYTFGSLPGLSMCAEDR | |
| | VKWYLFGMGNEVDVHAAFFHGQALTNKNYRIDTIN | |
| | LFPATLFDAYMVAQNPGEWMLSCQNLNHLKAGLQA | |
| | FFQVQECNKSSSKDNIRGKHVRHYYIAAEEIIWNY | |
| | APSGIDIFTKENLTAPGSDSAVFFEQGTTRIGGSY | |
| | KKLVYREYTDASFTNRKERGPEEEHLGILGPVIWA | |
| | EVGDTIRVTFHNKGAYPLSIEPIGVRFNKNNEGTY | |
| | YSPNYNPQSRSVPPSASHVAPTETFTYEWTVPKEV | |
| | GPTNADPVCLAKMYYSAVDPTKDIFTGLIGPMKIC | |
| | KKGSLHANGRQKDVDKEFYLFPTVFDENESLLLED | |
| | NIRMFTTAPDQVDKEDEDFQESNKMHSMNGFMYGN | |
| | QPGLTMCKGDSVVWYLFSAGNEADVHGIYFSGNTY | |
| | LWRGERRDTANLFPQTSLTLHMWPDTEGTFNVECL | |
| | TTDHYTGGMKQKYTVNQCRRQSEDSTFYLGERTYY | |
| | IAAVEVEWDYSPQREWEKELHHLQEQNVSNAFLDK | |
| | GEFYIGSKYKKVVYRQYTDSTFRVPVERKAEEEHL | |
| | GILGPQLHADVGDKVKIIFKNMATRPYSIHAHGVQ | |
| | TESSTVTPTLPGETLTYVWKIPERSGAGTEDSACI | |
| | PWAYYSTVDQVKDLYSGLIGPLIVCRRPYLKVFNP | |
| | RRKLEFALLFLVFDENESWYLDDNIKTYSDHPEKV | |
| | NKDDEEFIESNKMHAINGRMFGNLQGLTMHVGDEV | |
| | NWYLMGMGNEIDLHTVHFHGHSFQYKHRGVYSSDV | |
| | FDIFPGTYQTLEMFPRTPGIWLLHCHVTDHIHAGM | |
| | ETTYTVLQNEDTKSG | |
| 17 | MALSWVLTVLSLLPLLEAQIPLCANLVPVPITNAT | Human |
| | LDQITGKWFYIASAFRNEEYNKSVQEIQATFFYFT | Alpha-1- |
| | PNKTEDTIFLREYQTRQDQCIYNTTYLNVQRENGT | acid |
| | ISRYVGGQEHFAHLLILRDTKTYMLAFDVNDEKNW | glycoprotein 1 |
| | GLSVYADKPETTKEQLGEFYEALDCLRIPKSDVVY | (AGP1) |
| | TDWKKDKCEPLEKQHEKERKQEEGES | |
| 18 | MSALGAVIALLLWGQLFAVDSGNDVTDIADDGCPK | Human |
| | PPEIAHGYVEHSVRYQCKNYYKLRTEGDGVYTLND | Haptoglobin |
| | KKQWINKAVGDKLPECEADDGCPKPPEIAHGYVEH | (HPT) |
| | SVRYQCKNYYKLRTEGDGVYTLNNEKQWINKAVGD | |
| | KLPECEAVCGKPKNPANPVQRILGGHLDAKGSFPW | |
| | QAKMVSHHNLTTGATLINEQWLLTTAKNLFLNHSE | |
| | NATAKDIAPTLTLYVGKKQLVEIEKVVLHPNYSQV | |
| | DIGLIKLKQKVSVNERVMPICLPSKDYAEVGRVGY | |
| | VSGWGRNANFKFTDHLKYVMLPVADQDQCIRHYEG | |
| | STVPEKKTPKSPVGVQPILNEHTFCAGMSKYQEDT | |
| | CYGDAGSAFAVHDLEEDTWYATGILSFDKSCAVAE | |
| | YGVYVKVTSIQDWVQKTIAEN | |
| 19 | MARVLGAPVALGLWSLCWSLAIATPLPPTSAHGNV | Human |
| | AEGETKPDPDVTERCSDGWSFDATTLDDNGTMLFF | Hemopexin |
| | KGEFVWKSHKWDRELISERWKNFPSPVDAAFRQGH | (HEMO) |
| | NSVFLIKGDKVWVYPPEKKEKGYPKLLQDEFPGIP | |
| | SPLDAAVECHRGECQAEGVLFFQGDREWFWDLATG | |
| | TMKERSWPAVGNCSSALRWLGRYYCFQGNQFLRFD | |
| | PVRGEVPPRYPRDVRDYFMPCPGRGHGHRNGTGHG | |
| | NSTHHGPEYMRCSPHLVLSALTSDNHGATYAFSGT | |
| | HYWRLDTSRDGWHSWPIAHQWPQGPSAVDAAFSWE | |
| | EKLYLVQGTQVYVFLTKGGYTLVSGYPKRLEKEVG | |
| | TPHGIILDSVDAAFICPGSSRLHIMAGRRLWWLDL | |
| | KSGAQATWTELPWPHEKVDGALCMEKSLGPNSCSA | |
| | NGPGLYLIHGPNLYCYSDVEKLNAAKALPQPQNVT | |
| | SLLGCTH | |
| 20 | MISPVLILFSSFLCHVAIAGRTCPKPDDLPFSTVV | Human |
| | PLKTFYEPGEEITYSCKPGYVSRGGMRKFICPLTG | Beta-2- |
| | LWPINTLKCTPRVCPFAGILENGAVRYTTFEYPNT | glycoprotein 1 |
| | ISFSCNTGFYLNGADSAKCTEEGKWSPELPVCAPI | (APOH) |
| | ICPPPSIPTFATLRVYKPSAGNNSLYRDTAVFECL | |
| | PQHAMFGNDTITCTTHGNWTKLPECREVKCPFPSR | |
| | PDNGFVNYPAKPTLYYKDKATFGCHDGYSLDGPEE | |
| | IECTKLGNWSAMPSCKASCKVPVKKATVVYQGERV | |
| | KIQEKFKNGMLHGDKVSFFCKNKEKKCSYTEDAQC | |
| | IDGTIEVPKCFKEHSSLAFWKTDASDVKPC | |
| 21 | RPAIAINNPYVPR | |
| 22 | FFVAPFPEVFGK | |

[0627] In some embodiments, the at least one polypeptide standard of the one or more extraction internal standards is present in a known amount on the absorbent or bibulous member, such as a blood spot card. In some embodiments, the at least one polypeptide standard is present in a known amount on the absorbent or bibulous member, such as a blood spot card, prior to contact the absorbent or bibulous member with a blood sample. In some embodiments, the known amount of each of the one or more extraction internal standards, such as a polypeptide standard, is about 0.05 ppm to about 5 ppm. In some embodiments, the known amount of each of the one or more extraction internal standards, such as a polypeptide standard, is about 0.02 ppm to about 10 ppm, about 0.05 ppm to about 9 ppm, about 0.1 ppm to about 9 ppm, about 0.2 ppm to about 8 ppm, about 0.3 ppm to about 7 ppm, about 0.4 ppm to about 6 ppm, about 0.5 ppm to about 5 ppm, about 0.6 ppm to about 4 ppm, about 0.7 ppm to about 3 ppm, about 0.8 ppm to about 2 ppm, or about 0.9 ppm to about 1 ppm.

[0628] In some embodiments, the one or more extraction internal standards are deposited and dried on the absorbent or bibulous member, such as a blood spot card, within an area having a surface area of about 1,000 mm² or less. In some embodiments, the area for depositing the one or more extraction internal standards, such as a polypeptide standard, has a surface area of about 1,000 mm² or less, about 950 mm² or less, about 900 mm² or less, about 850 mm² or less, about 800 mm² or less, about 750 mm² or less, about 700 mm² or less, about 650 mm² or less, about 600 mm² or less, about 550 mm² or less, about 500 mm² or less, about 450 mm² or less, about 400 mm² or less, about 350 mm² or less, about 300 mm² or less, about 250 mm² or less, about 200 mm² or less, about 150 mm² or less, about 100 mm² or less, or about 50 mm² or less. In some embodiments, the area for depositing the one or more extraction internal standards, such as a polypeptide standard, has a surface area of 1,000 mm² or less, 950 mm² or less, 900 mm² or less, 850 mm² or less, 800 mm² or less, 750 mm² or less, 700 mm² or less, 650 mm² or less, 600 mm² or less, 550 mm² or less, 500 mm² or less, 450 mm² or less, 400 mm² or less, 350 mm² or less, 300 mm² or less, 250 mm² or less, 200 mm² or less, 150 mm² or less, 100 mm² or less, or 50 mm² or less. In some embodiments, the less can represent the lower limit of a range for surface area as described above where the lower limit is about 2 mm², 4 mm², 6 mm², 8 mm², or 10 mm².

[0629] In some embodiments, the one or more extraction internal standard, such as a polypeptide standard, are deposited and dried on the absorbent or bibulous member, such as a blood spot card, within the delimited zone. In some embodiments, the delimited zone for depositing and drying the one or more extraction internal standard is a defined area, such as marked by a visible line or dash. In some embodiments, the delimited zone is about 1,000 mm² or less. In some embodiments, the delimited zone is any size described herein. In some embodiments, the delimited zone contains a known amount of each of the one or more extraction internal standards, such as a polypeptide standard. In some embodiments, the delimited zone contains about 0.05 ppm to about 5 ppm of each of the one or more extraction internal standards.

III. Methods Associated with the Absorbent or Bibulous Members Described Herein

[0630] In certain aspects, provided herein are methods associated with the absorbent or bibulous members described herein, including absorbent or bibulous members comprising one or more extraction internal standards, wherein at least one of the extraction internal standards is a polypeptide standard.

[0631] In some embodiments, provided is a method of making an absorbent or bibulous member described herein, such as a blood spot card, comprising one or more extraction internal standards, wherein at least one of the extraction internal standards is a polypeptide standard, the method comprising depositing the one or more extraction internal standards on the absorbent or bibulous member. In some embodiments, the method comprises drying the one or more extraction internal standards following deposition on the absorbent or bibulous member.

[0632] In some embodiments, provided is a method for obtaining an absorbent or bibulous member, such as a blood spot card, comprising a blood sample deposited thereon, the method comprising providing the absorbent or bibulous member comprising one or more extraction internal standards, wherein at least one of the extraction internal standards is a polypeptide standard, and providing instructions for the deposition of the blood sample onto the absorbent or bibulous member. In some embodiments, the method comprises depositing the blood sample onto the absorbent or bibulous member. In some embodiments, the method comprises mailing, such as via standard mail with a government regulated mail carrier, e.g., The United States Postal Service, the absorbent or bibulous member comprising the blood sample and the one or more extraction internal standards.

[0633] In some embodiments, provided is a method of extracting at least a portion of a plurality of polypeptides and one or more extraction internal standards, wherein the one or more extraction internal standards comprises a polypeptide standard, from an absorbent or bibulous member, such as a blood spot card. In some embodiments, the method comprises: separating one or more portions of the blood spot card from the blood spot card, wherein the one or more portions of the absorbent or bibulous member comprise at least a portion of the blood sample and the one or more extraction internal standards; extracting at least the portion of the plurality of polypeptides and the one or more extraction internal standards from the one or more portions of the absorbent or bibulous member into an extraction solution; and precipitating at least the portion of the plurality of polypeptides and the one or more extraction internal standards to obtain the extracted sample. In some embodiments, the separating the one or more portions of the absorbent or bibulous member comprises punching the one or more portion of the absorbent or bibulous member using a punching device. In some embodiments, the separated portion of the absorbent or bibulous member is referred to as a chad. In some embodiments, the extracting may include a thermal denaturation step and as water bath sonication in order to mix and promote diffusion of glycoproteins out of absorbent or bibulous member and into the extraction solution. The extraction solution may include buffer such as 50 mM ammonium bicarbonate, and a reducing agent such as 25 mM DTT to help promote denaturation and extraction of the proteins.

[0634] In some embodiments, each of the one or more portions separated from the absorbent or bibulous member have a surface area of about 2 mm² to about 100 mm². In some embodiments, each of the one or more portions separated from the absorbent or bibulous member have a surface area of about any of 1 mm², 2 mm², 3 mm², 4 mm², 5 mm², 6 mm², 7 mm², 8 mm², 9 mm², 10 mm², 15 mm², 20 mm², 25 mm², 30 mm², 35 mm², 40 mm², 45 mm², 50 mm², 55 mm², 60 mm², 65 mm², 70 mm², 75 mm², 80 mm², 85 mm², 90 mm², 95 mm², or 100 mm².

[0635] In some embodiments, the precipitating at least the portion of the plurality of polypeptides and the one or more extraction internal standards comprises subjecting the at least the portion of the plurality of polypeptides and the one or more extraction internal standards to an organic solvent, such as either ethanol, methanol, or acetone.

[0636] In some embodiments, the method further comprises adding a solution, such as a buffer, e.g., ammonium bicarbonate, to the extracted sample to resolubilize polypeptide content therein prior to subjecting the extracted sample or the derivative thereof to the proteolytic digestion technique.

[0637] In some embodiments, provided herein is a method for performing a liquid chromatography-mass spectrometry (LC-MS) analysis of a proteolytic glycopeptide derived from a blood sample deposited on a delimited zone of an absorbent or bibulous member, such as a blood spot card, wherein the blood sample comprises a plurality of polypeptides comprising at least one glycoprotein, the method comprising extracting at least a portion of the plurality of polypeptides and one or more extraction internal standards from the absorbent or bibulous member to obtain an extracted sample, wherein the absorbent or bibulous member comprises the one or more extraction internal standards prior to deposition of the blood sample within the delimited zone, and wherein at least one of the one or more extraction internal standards comprises a polypeptide standard; subjecting the extracted sample or a derivative thereof to a proteolytic digestion technique to produce a proteolytically digested sample comprising the proteolytic glycopeptide; introducing at least a portion of the proteolytically digested sample to a liquid chromatography (LC) system of a LC-MS system; and performing the LC-MS analysis on at least the proteolytic glycopeptide and the one or more extraction internal standards.

[0638] In some embodiments, the performing the LC-MS analysis comprises measuring an abundance signal for the proteolytic glycopeptide and an abundance signal for the one or more extraction internal standards. In some embodiments, the performing the LC-MS analysis further comprises calculating a concentration of the proteolytic glycopeptide based on a concentration of the one or more extraction internal standards prior to deposition on the absorbent or bibulous member, such as a blood spot card, the abundance signal for the proteolytic glycopeptide, and the abundance signal for the one or more extraction internal standards.

[0639] In some embodiments, the method further comprises determining an extraction efficiency based on the LC-MS analysis of at least one of the one or more extraction internal standards. For example, in some embodiments, the extraction efficiency is based on an abundance signal for the one or more extraction internal standards as compared to a reference, such as a known amount of the one or more extraction internal standards deposited on the absorbent or bibulous member and/or comparison of two or more of the extraction internal standards.

[0640] In some embodiments, the method further comprises determining a digestion efficiency based on the LC-MS analysis of at least one of the one or more extraction internal standards. For example, in some embodiments, the digestion efficiency is based on an abundance signal for the one or more extraction internal standards, such as depletion of an abundance signal of a polypeptide standard comprising a protease cleavage site, and/or an increase in an abundance signal for one or more portions of a polypeptide standard, wherein the one or more portions of the polypeptide standard are a result of protease activity.

[0641] In some embodiments, the method further comprises assessing a sample migration pattern based on the LC-MS analysis of at least one of the one or more extraction internal standards. For example, in some embodiments, the sample migration pattern is based on an abundance signal for the one or more extraction internal standards obtained from a delimited zone of an absorbent or bibulous member, wherein the one or more extraction internal standards have known location prior to deposition of a blood sample on the absorbent or bibulous member. In some embodiments, the known location of the one or more extraction internal standards is within the delimited zone and the sample migration pattern provides information regarding the movement of the one or more extraction internal standards upon deposition of a blood sample. In some embodiments, the known location of the one or more extraction internal standards is outside of the delimited zone and the sample migration pattern provides information regarding the movement of the one or more extraction internal standards to the delimited zone upon deposition of a blood sample. In some embodiments, the movement of the one or more extraction internal standards provides information regarding the movement of a blood sample, or a component thereof, after being deposited onto an absorbent or bibulous member.

### D4. Methods for Proteolytically Digesting a Blood Sample Comprising a Glycoprotein

[0642] In certain aspects, provided herein are methods of proteolytically digesting a biological sample, such as an extract from a dried blood sample, comprising a glycoprotein. A dried blood spot sample can be punched to separate one or more discs which are then soaked in a buffer containing DTT at an elevated temperature of 95° C. and sonicated to extract the proteins and glycoproteins. In some embodiments, the extract can be in the form of a precipitate after the addition of either ethanol, methanol, or acetone. In some embodiments, the methods comprising subjecting the extract from the dried blood sample, or a portion thereof, to another thermal denaturation technique. Proteases are enzymes that cleave polypeptides at, generally, specific cleavage motifs. For example, trypsin is a serine protease that generally cleaves polypeptides at the carboxyl side (C-terminal side) of lysine and arginine residues. A glycan of a glycopeptide may present a steric hindrance to a protease, thereby inhibiting complete protease digestion of the extract from the dried blood sample, or a portion thereof, comprising a glycoprotein. Without being bound to this theory, it is believed that the methods taught herein improve polypeptide unfolding, such as linearization, and provide protease access to cleavage sites thereby providing methods for more complete proteolytic digestion of glycoproteins.

[0643] In some aspects, provided is a method comprising subjecting the extract from the dried blood sample, or portion thereof, to a thermal denaturation technique to produce a denatured sample.

[0644] In other aspects, provided is a method comprising subjecting the extract from the dried blood sample, or portion thereof, to a thermal denaturation technique to produce a denatured sample followed by a proteolytic digestion technique to produce a proteolytically digested sample comprising a proteolytic glycopeptide. In some embodiments, the method comprises quenching one or more proteases used in a proteolytic digestion technique prior to a downstream technique, such as LC-MS.

[0645] In other aspects, provided herein is a method comprising subjecting the extract from the dried blood sample, or portion thereof, to a thermal denaturation technique to produce a denatured sample; subjecting the denatured sample to a reduction technique to produce a reduced sample; subjecting the reduced sample to an alkylation technique to produce an alkylated sample; and subjecting the alkylated sample to a proteolytic digestion technique to produce a proteolytically digested sample comprising the proteolytic glycopeptide. In some embodiments, the method comprises quenching an alkylating agent used in the alkylation technique prior to subjecting an alkylated sample to a proteolytic digestion technique. In some embodiments, the method comprises quenching one or more proteases used in a proteolytic digestion technique prior to a downstream technique, such as LC-MS.

[0646] In some embodiments, the proteolytic digestion methods described herein produce a proteolytic digestion sample, including one comprising a proteolytic glycopeptide, having a digestion completion rate of at least about 70%, such as at least about any of 75%, 80%, 85%, 90%, 91%, 92%, 93%, 94%, 95%, 96%, 97%, 98%, or 99%. In some embodiments, the proteolytic digestion methods described herein produce a proteolytic digestion sample, including one comprising a proteolytic glycopeptide, wherein the sample volume loss is 10% or less, such as 9% or less, 8% or less, 7% or less, 6% or less, 5% or less, 4% or less, 3% or less, 2% or less, or 1% or less, based on all volumes added in producing the proteolytic digestion sample.

[0647] In the following sections, additional description of the various aspects of the proteolytic digestion techniques is provided. Such description in a modular fashion is not intended to limit the scope of the disclosure, and based on the teachings provided herein one of ordinary skill in the art will readily appreciate that certain modules can be integrated, at least in part. The section heading used herein are for organizational purposes only and are not to be construed as limiting the subject matter described.

### I. Thermal Denaturation Techniques

[0648] In certain aspects, the methods provided herein comprise performing a thermal denaturation technique. Thermal denaturation techniques, generally speaking, change certain polypeptides conformational structures, such as by unfolding and/or linearizing a polypeptide, to enable protease access to cleavage sites. Thermal denaturation techniques described herein comprise subjecting a sample, or a derivative thereof (e.g., a sample diluted with a buffer), to a thermal treatment of about 60° C. to about 100° C. for thermal denaturation incubation time of at least about 1 minute. In some embodiments, the thermal denaturation technique is not performed concurrently with a chemical denaturation technique, such as using high concentrations of denaturing agent, e.g., 6 M urea. In some embodiments, the method does not include use of a chemical denaturation technique.

[0649] In some embodiments, the thermal denaturation incubation time is performed at a temperature of about 60° C. to about 100° C., such as any of about 70° C. to about 100° C., about 80° C. to about 100° C., about 90° C. to about 100° C., about 95° C. to about 100° C., or about 85° C. to about 95° C. In some embodiments, the thermal denaturation incubation time is performed at a temperature of at least about 60° C., such as at least about any of 65° C., 70° C., 75° C., 80° C., 85° C., 90° C., 95° C., or 100° C. In some embodiments, the thermal denaturation incubation time is performed at a temperature of about 100° C. or less, such as about any of 95° C. or less, 90° C. or less, 85° C. or less, 80° C. or less, 75° C. or less, 70° C. or less, 65° C. or less, 60° C. or less. In some embodiments, the thermal denaturation incubation time is performed at a temperature of about any of 60° C., 65° C., 70° C., 75° C., 80° C., 85° C., 90° C., 91° C., 92° C., 93° C., 94° C., 95° C., 96° C., 97° C., 98° C., 99° C., or 100° C.

[0650] In some embodiments, the thermal denaturation incubation time is about 1 minute to about 15 minutes, such as any of about 1 minute to about 5 minutes, about 1 minute to about 10 minutes, about 2.5 minutes to about 7.5 minutes, or about 5 minutes to about 15 minutes. In some embodiments, the thermal denaturation incubation time is at least about 1 minute, such as at least about any of 1.5 minutes, 2 minutes, 2.5 minutes, 3 minutes, 3.5 minutes, 4 minutes, 4.5 minutes, 5 minutes, 5.5 minutes, 6 minutes, 6.5 minutes, 7 minutes, 7.5 minutes, 8 minutes, 8.5 minutes, 9 minutes, 9.5 minutes, 10 minutes, 11 minutes, 12 minutes, 13 minutes, 14 minutes, or 15 minutes. In some embodiments, the thermal denaturation incubation time is about 15 minutes or less, such as about any of 14 minutes or less, 13 minutes or less, 12 minutes or less, 11 minutes or less, 10 minutes or less, 9.5 minutes or less, 9 minutes or less, 8.5 minutes or less, 8 minutes or less, 7.5 minutes or less, 7 minutes or less, 6.5 minutes or less, 6 minutes or less, 5.5 minutes or less, 5 minutes or less, 4.5 minutes or less, 4 minutes or less, 3.5 minutes or less, 3 minutes or less, 2.5 minutes or less, 2 minutes or less, 1.5 minutes or less, or 1 minute or less. In some embodiments, the thermal denaturation incubation time is about any of 1 minute, 1.5 minutes, 2 minutes, 2.5 minutes, 3 minutes, 3.5 minutes, 4 minutes, 4.5 minutes, 5 minutes, 5.5 minutes, 6 minutes, 6.5 minutes, 7 minutes, 7.5 minutes, 8 minutes, 8.5 minutes, 9 minutes, 9.5 minutes, 10 minutes, 11 minutes, 12 minutes, 13 minutes, 14 minutes, or 15 minutes.

[0651] In some embodiments, the thermal denaturation technique comprises a thermal denaturation incubation time of about 1 minute to about 15 minutes, such as about any of 1 minute, 2 minutes, 3 minutes, 4 minutes, 5 minutes, 6 minutes, 7 minutes, 8 minutes, 9 minutes 10 minutes, 11 minutes, 12 minutes, 13 minutes, 14 minutes, or 15 minutes, wherein the thermal denaturation incubation is performed at a temperature of about 60° C. to about 100° C., such about any of 60° C., 65° C., 70° C., 75° C., 80° C., 85° C., 90° C., 91° C., 92° C., 93° C., 94° C., 95° C., 96° C., 97° C., 98° C., 99° C., or 100° C.

[0652] The thermal denaturation incubation temperature can be controlled by numerous techniques and combinations thereof. In some embodiments, the thermal denaturation incubation temperature is controlled by a water bath. In some embodiments, the thermal denaturation incubation temperature is controlled by a heat block. In some embodiments, the thermal denaturation incubation temperature is controlled by a thermocycler, e.g., a thermocycler with a lid temperature control element. As described herein, in some embodiments, control of sample temperature when performed using a thermocycler is via a temperature block element. In some embodiments, temperature changes prior to and/or after the thermal denaturation incubation time temperature are controlled by a technique described herein, such as cooling at room temperature or via the thermocycler.

[0653] In some embodiments, the thermal denaturation technique comprises subjecting a sample, or a derivative thereof, e.g., a sample diluted in a buffer, to a thermal cycle. In some embodiments, the thermal cycle comprises subjecting the sample, or a derivative thereof, to one or more of: (a) a block starting temperature (b) block set temperature (the temperature for the thermal denaturation incubation time); (c) a block ending temperature; (d) one or more ramp rates between temperature changes in the thermal cycle (such as between the block starting temperature and the block set temperature or between the block set temperature and the block ending temperature); and (e) a lid temperature relative to the block temperature. In some embodiments, the thermal cycle is performed, in whole or in part, using a thermocycler. In some embodiments, the thermal cycle is configured to reduce and/or prevent loss of sample, such as by escaping vapor and/or condensation when the sample container is opened. In some embodiments, the thermal cycle comprises a set block temperature of about 60° C. to about 100° C., including about any of 60° C., 65° C., 70° C., 75° C., 80° C., 85° C., 90° C., 91° C., 92° C., 93° C., 94° C., 95° C., 96° C., 97° C., 98° C., 99° C., or 100° C. In some embodiments, the thermal cycle comprises: (a) a set block temperature of about 60° C. to about 100° C., including about any of 60° C., 65° C., 70° C., 75° C., 80° C., 85° C., 90° C., 91° C., 92° C., 93° C., 94° C., 95° C., 96° C., 97° C., 98° C., 99° C., or 100° C., and (b) a block ending temperature of about 15° C. to about 35° C., such as any of about 20° C. to about 35° C., or about 20° C. to about 25° C. In some embodiments, the thermal cycle comprises: (a) starting block temperature of about 15° C. to about 50° C., such as any of 15° C. to about 25° C., about 20° C. to about 30° C., or about 20° C. to about 25° C., including about any of 20° C., 21° C., 22° C., 23° C., 24° C., 25° C., (b) a set block temperature of about 60° C. to about 100° C., such about any of 60° C., 65° C., 70° C., 75° C., 80° C., 85° C., 90° C., 91° C., 92° C., 93° C., 94° C., 95° C., 96° C., 97° C., 98° C., 99° C., or 100° C., and (c) a block ending temperature of about 15° C. to about 35° C., such as any of about 20° C. to about 35° C., or about 20° C. to about 25° C. In any of the thermal cycles described herein, in some embodiments, the lid temperature during the thermal cycle is configured to reduce and/or inhibit condensate formation near or on the lid of a sample container. In some embodiments, the lid temperature during the thermal cycle is at least about 2° C., such as at least about any of 2.5° C., 3° C., 3.5° C., 4° C., 4.5° C., 5° C., 5.5° C., 6° C., 6.5° C., 7° C., 7.5° C., 8° C., 8.5° C., 9° C., 9.5° C., 10° C., 11° C., 12° C., 13° C., 14° C., 15° C., 16° C., 17° C., 18° C., 19° C., or 20° C., higher than the respective temperature of the block during the thermal cycle. In some embodiments, the lid temperature during at least a portion of a thermal cycle is about 102° C. to about 120° C., such as about any of 103° C., 104° C., 105° C., 106° C., 107° C., 108° C., 109° C., or 110° C. In some embodiments, the lid temperature during the thermal cycle may be the same respective temperature of the block during the thermal cycle or a temperature greater than the temperature of the block during the thermal cycle. In some embodiments, the lid temperature during the thermal cycle may be the same respective temperature of the block during the thermal cycle or a temperature greater than the temperature of the block during the thermal cycle.

[0654] In some embodiments, the ramp rate between a temperature change in a thermal cycle (such as between a block starting temperature and a block set temperature and/or between a block set temperature a the block ending temperature) is about 1° C./second to about 10° C./second, such as any of 1° C./second, 1.5° C./second, 2° C./second, 2.5° C./second, 3° C./second, 3.5° C./second, 4° C./second, 4.5° C./second, 5° C./second, 5.5° C./second, 6° C./second, 6.5° C./second, 7° C./second, 7.5° C./second, 8° C./second, 8.5° C./second, 9° C./second, 9.5° C./second, or 10° C./second.

[0655] In some embodiments, the method further comprises admixing an amount of a blood sample, or portion thereof, a buffer prior to the thermal denaturation technique (e.g., the buffered sample is subjected to a thermal denaturation technique described herein). In some embodiment, the amount (as assessed based on the final concentration in the sample containing solution containing solution) of the buffer is about 1 mM to about 100 mM, such as any of about 20 mM to about 80 mM, about 30 mM to about 70 mM, or about 40 mM to about 60 mM. In some embodiment, the amount of the buffer is about any of 10 mM, 15 mM, 20 mM, 25 mM, 30 mM, 35 mM, 40 mM, 45 mM, 50 mM, 55 mM, 60 mM, 65 mM, 70 mM, 75 mM, 80 mM, 85 mM, 90 mM, 95 mM, or 100 mM. In some embodiments, the buffer is selected from the group consisting of ammonium bicarbonate, ammonium acetate, ammonium formate, triethylammonium bicarbonate, and Tris-HCl, or any combination thereof.

[0656] In some embodiments, the method further comprises determining the protein concentration in a blood sample or a derivative thereof.

### II. Reduction Techniques

[0657] In certain aspects, the methods provided herein comprise performing a reduction technique. In some embodiments, the reduction technique is performed on a sample, or a derivative thereof, following thermal denaturation. Reduction techniques, generally speaking, reduce (e.g., cleave) disulfide linkages between cysteine residues of one or more polypeptides to reduce the presence of polypeptide conformations that inhibit or prevent protease cleavage of the one or more polypeptides. Reduction techniques described herein comprise subjecting a sample, or a derivative thereof (e.g., a denatured sample), to an amount of a reducing agent and incubating for a reducing incubation time performed at a temperature or range thereof.

[0658] In some embodiments, the reducing agent is dithiothreitol (DTT), tris(2-carboxyethyl) phosphine (TCEP), beta-mercaptoethanol (BME), or a cysteine, or any mixture thereof.

[0659] In some embodiments, the amount (as assessed based on the final concentration in the sample containing solution containing solution) of a reducing agent, e.g., DTT, used in a reduction technique is about 1 mM to about 100 mM, such as any of about 1 mM to about 40 mM, about 1 mM to about 30 mM, about 5 mM to about 25 mM, about 10 mM, to about 20 mM, 20 mM to about 80 mM, about 30 mM to about 70 mM, or about 40 mM to about 60 mM. In some embodiments, the amount of reducing agent used in a reduction technique is at least about 1 mM, such as at least about any of 2 mM, 3 mM, 4 mM, 5 mM, 6 mM, 7 mM, 8 mM, 9 mM, 10 mM, 11 mM, 12 mM, 13 mM, 14 mM, 15 mM, 16 mM, 17 mM, 18 mM, 19 mM, 20 mM, 25 mM, 30 mM, 35 mM, 40 mM, 45 mM, 50 mM, 55 mM, 60 mM, 65 mM, 70 mM, 75 mM, 80 mM, 85 mM, 90 mM, 95 mM, or 100 mM. In some embodiments, the amount of reducing agent used in a reduction technique is about 100 mM or less, such as about any of 95 mM or less, 90 mM or less, 85 mM or less, 80 mM or less, 75 mM or less, 70 mM or less, 65 mM or less, 60 mM or less, 55 mM or less, 50 mM or less, 45 mM or less, 40 mM or less, 35 mM or less, 30 mM or less, 25 mM or less, 20 mM or less, 19 or less, 18 or less, 17 or less, 16 or less, 15 or less, 14 or less, 13 or less, 12 or less, 11 or less, 10 or less, 9 or less, 8 or less, 7 or less, 6 or less, 5 or less, 4 or less, 3 or less, 2 or less, or 1 or less. In some embodiments, the amount of reducing agent used in a reduction technique is about any of 1 mM, 2 mM, 3 mM, 4 mM, 5 mM, 6 mM, 7 mM, 8 mM, 9 mM, 10 mM, 11 mM, 12 mM, 13 mM, 14 mM, 15 mM, 16 mM, 17 mM, 18 mM, 19 mM, 20 mM, 25 mM, 30 mM, 35 mM, 40 mM, 45 mM, 50 mM, 55 mM, 60 mM, 65 mM, 70 mM, 75 mM, 80 mM, 85 mM, 90 mM, 95 mM, or 100 mM.

[0660] In some embodiments, the reduction incubation time is about 10 minutes to about 120 minutes, such as any of about 30 minutes to about 60 minutes, about 40 minutes to about 60 minutes, about 45 minutes to about 55 minutes. In some embodiments, the reduction incubation time is at least about 20 minutes, such as at least about any of 25 minutes, 30 minutes, 35 minutes, 40 minutes, 45 minutes, 50 minutes, 55 minutes, 60 minutes, 65 minutes, 70 minutes, 75 minutes, 80 minutes, 85 minutes, 90 minutes, 95 minutes, 100 minutes, 105 minutes, 110 minutes, or 115 minutes. In some embodiments, the reduction incubation time is about 120 minutes or less, such as about any of 115 minutes or less, 110 minutes or less, 105 minutes or less, 100 minutes or less, 95 minutes or less, 90 minutes or less, 85 minutes or less, 80 minutes or less, 75 minutes or less, 70 minutes or less, 65 minutes or less, 60 minutes or less, 55 minutes or less, 50 minutes or less, 45 minutes or less, 40 minutes or less, 35 minutes or less, 30 minutes or less, or 25 minutes or less. In some embodiments, the reduction incubation time is about any of 20 minutes, 25 minutes, 30 minutes, 35 minutes, 40 minutes, 45 minutes, 50 minutes, 55 minutes, 60 minutes, 65 minutes, 70 minutes, 75 minutes, 80 minutes, 85 minutes, 90 minutes, 95 minutes, 100 minutes, 105 minutes, 110 minutes, or 115 minutes.

[0661] In some embodiments, the reduction incubation time is performed at a temperature of about 20° C. to about 100° C., such as any of about 40° C. to about 80° C., about 50° C. to about 70° C., about 50° C. to about 60° C., about 55° C. to about 65° C., or about 60° C. to about 70° C. In some embodiments, the reduction incubation time is performed at a temperature of at least about 20° C., such as at least about any of 25° C., 30° C., 35° C., 40° C., 45° C., 50° C., 55° C., 60° C., 65° C., 70° C., 75° C., 80° C., 85° C., 90° C., or 95° C. In some embodiments, the reduction incubation time is performed at a temperature of about 95° C. or less, such as about any of 90° C. or less, 85° C. or less, 80° C. or less, 75° C. or less, 70° C. or less, 65° C. or less, 60° C. or less, 55° C. or less, 50° C. or less, 45° C. or less, 40° C. or less, 35° C. or less, 30° C. or less, or 25° C. or less. In some embodiments, the reduction incubation time is performed at a temperature of about any of 20° C., 25° C., 30° C., 35° C., 40° C., 45° C., 50° C., 51° C., 52° C., 53° C., 54° C., 55° C., 56° C., 57° C., 58° C., 59° C., 60° C., 61° C., 62° C., 63° C., 64° C., 65° C., 66° C., 67° C., 68° C., 69° C., 70° C., 75° C., 80° C., 85° C., 90° C., or 95° C. In some embodiments, the reduction incubation time is performed at a room temperature.

[0662] In some embodiments, the reduction technique comprises a reduction incubation time of about 30 minutes to about 70 minutes, such as about any of 35 minutes, 40 minutes, 45 minutes, 50 minutes, 55 minutes, 60 minutes, or 65 minutes, wherein the reduction incubation time is performed at a temperature of about 50° C. to about 70° C., such about any of 55° C., 60° C., or 65° C. In some embodiments, the reduction technique comprises use of an amount (as assessed based on the final concentration in the sample containing solution) of a reducing agent, e.g., DTT, of about 5 mM to about 25 mM, such as any of about 6 mM, 7 mM, 8 mM, 9 mM, 10 mM, 11 mM, 12 mM, 13 mM, 14 mM, 15 mM, 16 mM, 17 mM, 18 mM, 19 mM, 20 mM, 21 mM, 22 mM, 23 mM, or 24 mM, and a reduction incubation time of about 30 minutes to about 70 minutes, such as about any of 35 minutes, 40 minutes, 45 minutes, 50 minutes, 55 minutes, 60 minutes, or 65 minutes, wherein the reduction incubation time is performed at a temperature of about 50° C. to about 70° C., such about any of 55° C., 60° C., or 65° C.

[0663] The reduction incubation temperature can be controlled by numerous techniques and combinations thereof. In some embodiments, the reduction incubation temperature is controlled by an ambient temperature, such as room temperature. In some embodiments, the reduction incubation temperature is controlled by a water bath. In some embodiments, the reduction incubation temperature is controlled by a heat block. In some embodiments, the reduction incubation temperature is controlled by a thermocycler, e.g., a thermocycler with a lid temperature control element. As described herein, in some embodiments, control of sample temperature when performed using a thermocycler is via a temperature block element. In some embodiments, temperature changes prior to and/or after the reduction incubation time temperature are controlled by a technique described herein, such as cooling at room temperature or a ramp rate.

[0664] In some embodiments, the reduction technique comprises subjecting a sample, or a derivative thereof, e.g., a denatured sample, to a thermal cycle. In some embodiments, the thermal cycle comprises subjecting the sample, or a derivative thereof, to one or more of: (a) a block starting temperature (b) block set temperature (the temperature for the reduction incubation time); (c) a block ending temperature; (d) one or more ramp rates between temperature changes in the thermal cycle (such as between the block starting temperature and the block set temperature or between the block set temperature and the block ending temperature); and (e) a lid temperature relative to the block temperature. In some embodiments, the thermal cycle is performed, in whole or in part, using a thermocycler. In some embodiments, the thermal cycle is configured to reduce and/or prevent loss of sample, such as by escaping vapor and/or condensation when the sample container is opened. In some embodiments, the thermal cycle comprises a set block temperature of about 20° C. to about 100° C., such as any of 40° C. to about 80° C., about 50° C. to about 70° C., about 50° C. to about 60° C., about 55° C. to about 65° C., or about 60° C. to about 70° C., including about any of 50° C., 55° C., 60° C., 65° C., or 70° C. In some embodiments, the thermal cycle comprises: (a) a set block temperature of about 20° C. to about 100° C., such as any of about 40° C. to about 80° C., about 50° C. to about 70° C., about 50° C. to about 60° C., about 55° C. to about 65° C., or about 60° C. to about 70° C., including about any of 50° C., 55° C., 60° C., 65° C., or 70° C., and (b) a block ending temperature of about 15° C. to about 35° C., such as any of about 20° C. to about 35° C., or about 20° C. to about 25° C. In some embodiments, the thermal cycle comprises: (a) starting block temperature of about 15° C. to about 60° C., such as any of about 15° C. to about 50° C., about 20° C. to about 40° C., about 20° C. to about 30° C., or about 20° C. to about 25° C., (b) a set block temperature of about 20° C. to about 100° C., such as any of about 40° C. to about 80° C., about 50° C. to about 70° C., about 50° C. to about 60° C., about 55° C. to about 65° C., or about 60° C. to about 70° C., including about any of 50° C., 55° C., 60° C., 65° C., or 70° C., and (c) a block ending temperature of about 15° C. to about 35° C., such as any of about 20° C. to about 35° C., or about 20° C. to about 25° C. In any of the thermal cycles described herein, in some embodiments, the lid temperature during the thermal cycle is configured to reduce and/or inhibit condensate formation near or on the lid of a sample container. In some embodiments, the lid temperature during the thermal cycle is at least about 2° C., such as at least about any of 2.5° C., 3° C., 3.5° C., 4° C., 4.5° C., 5° C., 5.5° C., 6° C., 6.5° C., 7° C., 7.5° C., 8° C., 8.5° C., 9° C., 9.5° C., 10° C., 11° C., 12° C., 13° C., 14° C., 15° C., 16° C., 17° C., 18° C., 19° C., or 20° C., higher than the respective temperature of the block during the thermal cycle. In some embodiments, the lid temperature during at least a portion of a thermal cycle is about 102° C. to about 120° C., such as about any of 103° C., 104° C., 105° C., 106° C., 107° C., 108° C., 109° C., or 110° C.

[0665] In some embodiments, the ramp rate between a temperature change in a thermal cycle (such as between a block starting temperature and a block set temperature and/or between a block set temperature a the block ending temperature) is about 1° C./second to about 10° C./second, such as any of 1° C./second, 1.5° C./second, 2° C./second, 2.5° C./second, 3° C./second, 3.5° C./second, 4° C./second, 4.5° C./second, 5° C./second, 5.5° C./second, 6° C./second, 6.5° C./second, 7° C./second, 7.5° C./second, 8° C./second, 8.5° C./second, 9° C./second, 9.5° C./second, or 10° C./second.

[0666] In some embodiments, the reduction technique described herein is completed simultaneously with a thermal denaturation step. For example, the combined thermal denaturation technique and reduction technique comprises adding a reducing agent to a sample, or a derivative thereof, and then subjecting the sample, or the derivative thereof, to a temperature of about 60° C. to about 100° C., such about any of 60° C., 65° C., 70° C., 75° C., 80° C., 85° C., 90° C., 91° C., 92° C., 93° C., 94° C., 95° C., 96° C., 97° C., 98° C., 99° C., or 100° C., for an incubation time of at least about 1 minute, such as at least about any of 2 minutes, 3 minutes, 4 minutes, 5 minutes, 10 minutes, 15 minutes, 20 minutes, 25 minutes, 30 minutes, 35 minutes, 40 minutes, 45 minutes, 50 minutes, 55 minutes, or 60 minutes. In some embodiments, the combined thermal denaturation technique and reduction technique comprises adding a reducing agent to a sample, or a derivative thereof, and then subjecting the sample, or the derivative thereof, to a temperature of about 90° C. to about 100° C., for an incubation time of about 40 minutes to about 60 minutes, including 50 minutes.

### III. Alkylation Techniques

[0667] In certain aspects, the methods provided herein comprise performing an alkylation technique. In some embodiments, the alkylation technique is performed on a sample, or a derivative thereof, following the performance of a reduction technique. Alkylation techniques, generally speaking, prevent the reformation of one or more disulfide linkages between, e.g., cysteine residues of one or more polypeptides. This is done by, e.g., the addition of an acetamide moiety to the sulfur of a cysteine residue thereby producing an alkylated polypeptide. Alkylation techniques may reduce the presence of polypeptide conformations that inhibit or prevent protease cleavage of the one or more polypeptides. Alkylation techniques described herein comprise subjecting a sample, or a derivative thereof (e.g., a reduced sample), to an amount of an alkylating agent and incubating for an alkylation incubation time performed at a temperature or range thereof. In some embodiments, the method comprises subjecting a denatured sample to a reduction technique followed by an alkylation technique prior to performing a proteolytic digestion technique.

[0668] In some embodiments, the alkylating agent is iodoacetamide (IAA), 2-chloroacetamide, an acetamide salt, or any mixture thereof.

[0669] In some embodiments, the amount (as assessed based on the final concentration in the sample containing solution) of an alkylating agent, e.g., IAA, used in an alkylation technique is about 10 mM to about 100 mM, such as any of about 10 mM to about 50 mM, about 20 mM to about 40 mM, about 20 mM to about 36 mM, about 15 mM to about 25 mM, about 20 mM to about 25 mM, about 20 mM to about 80 mM, about 30 mM to about 70 mM, or about 40 mM to about 60 mM. In some embodiments, the amount of an alkylating agent used in an alkylation technique is at least about 10 mM, such as at least about any of 15 mM, 16 mM, 17 mM, 18 mM, 19 mM, 20 mM, 21 mM, 22 mM, 23 mM, 24 mM, 25 mM, 30 mM, 35 mM, 40 mM, 45 mM, 50 mM, 55 mM, 60 mM, 65 mM, 70 mM, 75 mM, 80 mM, 85 mM, 90 mM, 95 mM, or 100 mM. In some embodiments, the amount of an alkylating agent used in an alkylation technique is about 100 mM or less, such as about any of 95 mM or less, 90 mM or less, 85 mM or less, 80 mM or less, 75 mM or less, 70 mM or less, 65 mM or less, 60 mM or less, 55 mM or less, 50 mM or less, 45 mM or less, 40 mM or less, 35 mM or less, 30 mM or less, 25 mM or less, 24 mM or less, 23 mM or less, 22 mM or less, 21 mM or less, 20 mM or less, 19 mM or less, 18 mM or less, 17 mM or less, 16 mM or less, 15 mM or less, or 10 mM or less. In some embodiments, the amount of an alkylating agent used in an alkylation technique is about any of 10 mM, 15 mM, 20 mM, 20.5 mM, 21 mM, 21.5 mM, 22 mM, 22.5 mM, 23 mM, 23.5 mM, 24 mM, 24.5 mM, 25 mM, 30 mM, 35 mM, 40 mM, 45 mM, 50 mM, 55 mM, 60 mM, 65 mM, 70 mM, 75 mM, 80 mM, 85 mM, 90 mM, 95 mM, or 100 mM.

[0670] In some embodiments, the alkylation incubation time is about 5 minutes to about 60 minutes, such as any of about 10 minutes to about 50 minutes, about 20 minutes to about 40 minutes, or about 25 minutes to about 35 minutes. In some embodiments, the alkylation incubation time is at least about 5 minutes, such as at least about any of 10 minutes, 15 minutes, 20 minutes, 25 minutes, 30 minutes, 35 minutes, 40 minutes, 45 minutes, 50 minutes, 55 minutes, or 60 minutes. In some embodiments, the alkylation incubation time is about 60 minutes or less, such as about any of 55 minutes or less, 50 minutes or less, 45 minutes or less, 40 minutes or less, 35 minutes or less, 30 minutes or less, 25 minutes or less, 20 minutes or less, 15 minutes or less, 10 minutes or less, or 5 minutes or less. In some embodiments, the alkylation incubation time is about any of 5 minutes, 10 minutes, 15 minutes, 20 minutes, 25 minutes, 30 minutes, 35 minutes, 40 minutes, 45 minutes, 50 minutes, 55 minutes, or 60 minutes.

[0671] In some embodiments, the alkylation incubation time is performed at a temperature of about 15° C. to about 100° C., such as any of about 15° C. to about 80° C., about 15° C. to about 60° C., about 15° C. to about 35° C., about 20° C. to about 30° C., or about 20° C. to about 25° C. In some embodiments, the alkylation incubation time is performed at a temperature of at least about 15° C., such as at least about any of 20° C., 21° C., 22° C., 23° C., 24° C., 25° C., 30° C., 35° C., 40° C., 45° C., 50° C., 55° C., 60° C., 65° C., 70° C., 75° C., 80° C., 85° C., 90° C., or 95° C. In some embodiments, the alkylation incubation time is performed at a temperature of about 95° C. or less, such as about any of 90° C. or less, 85° C. or less, 80° C. or less, 75° C. or less, 70° C. or less, 65° C. or less, 60° C. or less, 55° C. or less, 50° C. or less, 45° C. or less, 40° C. or less, 35° C. or less, 30° C. or less, 25° C. or less, 24° C. or less, 23° C. or less, 22° C. or less, 21° C. or less, or 20° C. or less. In some embodiments, the alkylation incubation time is performed at a temperature of about any of 15° C., 16° C., 17° C., 18° C., 19° C., 20° C., 21° C., 22° C., 23° C., 24° C., 25° C., 30° C., 35° C., 40° C., 45° C., 50° C., 51° C., 52° C., 53° C., 54° C., 55° C., 56° C., 57° C., 58° C., 59° C., 60° C., 61° C., 62° C., 63° C., 64° C., 65° C., 66° C., 67° C., 68° C., 69° C., 70° C., 75° C., 80° C., 85° C., 90° C., or 95° C. In some embodiments, the alkylation incubation time is performed at a room temperature.

[0672] In some embodiments, the alkylation technique comprises an alkylation incubation time of about 5 minutes to about 60 minutes, such as about any of 15 minutes, 20 minutes, 25 minutes, 30 minutes, 35 minutes, or 40 minutes, wherein the alkylation incubation time is performed at a temperature of about 15° C. to about 30° C., such about any of 20° C., 21° C., 22° C., 23° C., 24° C., or 25° C. In some embodiments, the alkylation technique comprises use of an amount (containing solution based on the final concentration in the sample) of an alkylating agent, e.g., IAA, of about 15 mM to about 40 mM, such as any of about 20 mM, 20.5 mM, 21 mM, 21.5 mM, 22 mM, 22.5 mM, 23 mM, 23.5 mM, 24 mM, 24.5 mM, 25 mM, 25.5 mM, 26 mM, 26.5 mM, 27 mM, 27.5 mM, 28 mM, 28.5 mM, 29 mM, 29.5 mM, 30 mM, 30.5 mM, 31 mM, 31.5 mM, 32 mM, 32.5 mM, 33 mM, 33.5 mM, 34 mM, 34.5 mM, 35 mM, 35.5 mM, 36 mM, 36.5 mM, 37 mM, 37.5 mM, 38 mM, and an alkylation incubation time of about 5 minutes to about 60 minutes, such as about any of 15 minutes, 20 minutes, 25 minutes, 30 minutes, 35 minutes, or 40 minutes, wherein the alkylation incubation time is performed at a temperature of about 15° C. to about 30° C., such about any of 20° C., 21° C., 22° C., 23° C., 24° C., or 25° C.

[0673] The alkylation incubation temperature can be controlled by numerous techniques and combinations thereof. In some embodiments, the alkylation incubation temperature is controlled by an ambient temperature, such as room temperature. In some embodiments, the alkylation incubation temperature is controlled by a water bath. In some embodiments, the alkylation incubation temperature is controlled by a heat block. In some embodiments, the alkylation incubation temperature is controlled by a thermocycler, e.g., a thermocycler with a lid temperature control element. As described herein, in some embodiments, control of sample temperature when performed using a thermocycler is via a temperature block element. In some embodiments, temperature changes prior to and/or after the alkylation incubation time temperature are controlled by a technique described herein, such as cooling at room temperature or a ramp rate.

[0674] In some embodiments, the alkylation technique comprises subjecting a sample, or a derivative thereof, e.g., a denatured sample, to a thermal cycle. In some embodiments, the thermal cycle comprises subjecting the sample, or a derivative thereof, to one or more of: (a) a block starting temperature (b) block set temperature (the temperature for the alkylation incubation time); (c) a block ending temperature; (d) one or more ramp rates between temperature changes in the thermal cycle (such as between the block starting temperature and the block set temperature or between the block set temperature and the block ending temperature); and (e) a lid temperature relative to the block temperature. In some embodiments, the thermal cycle is performed, in whole or in part, using a thermocycler. In some embodiments, the thermal cycle is configured to reduce and/or prevent loss of sample, such as by escaping vapor and/or condensation when the sample container is opened. In some embodiments, the thermal cycle comprises a set block temperature of about 15° C. to about 30° C., such as any of 15° C. to about 25° C., about 20° C. to about 30° C., or about 20° C. to about 25° C., including about any of 20° C., 21° C., 22° C., 23° C., 24° C., or 25° C. In some embodiments, the thermal cycle comprises: (a) a set block temperature of about 15° C. to about 30° C., such as any of 15° C. to about 25° C., about 20° C. to about 30° C., or about 20° C. to about 25° C., including about any of 20° C., 21° C., 22° C., 23° C., 24° C., or 25° C., and (b) a block ending temperature of about 15° C. to about 35° C., such as any of about 20° C. to about 35° C., or about 20° C. to about 25° C. In some embodiments, the thermal cycle comprises: (a) starting block temperature of about 15° C. to about 30° C., such as any of 15° C. to about 25° C., about 20° C. to about 30° C., or about 20° C. to about 25° C., including about any of 20° C., 21° C., 22° C., 23° C., 24° C., or 25° C., (b) a set block temperature of about 15° C. to about 30° C., such as any of 15° C. to about 25° C., about 20° C. to about 30° C., or about 20° C. to about 25° C., including about any of 20° C., 21° C., 22° C., 23° C., 24° C., or 25° C., and (c) a block ending temperature of about 15° C. to about 35° C., such as any of about 20° C. to about 35° C., or about 20° C. to about 25° C. In any of the thermal cycles described herein, in some embodiments, the lid temperature during the thermal cycle is configured to reduce and/or inhibit condensate formation near or on the lid of a sample container. In some embodiments, the lid temperature during the thermal cycle is at least about 2° C., such as at least about any of 2.5° C., 3° C., 3.5° C., 4° C., 4.5° C., 5° C., 5.5° C., 6° C., 6.5° C., 7° C., 7.5° C., 8° C., 8.5° C., 9° C., 9.5° C., 10° C., 11° C., 12° C., 13° C., 14° C., 15° C., 16° C., 17° C., 18° C., 19° C., or 20° C., higher than the respective temperature of the block during the thermal cycle. In some embodiments, the lid temperature during at least a portion of a thermal cycle is about 102° C. to about 120° C., such as about any of 103° C., 104° C., 105° C., 106° C., 107° C., 108° C., 109° C., or 110° C.

[0675] In some embodiments, the alkylation technique further comprises quenching the alkylating agent comprising use of a neutralizing agent. In some embodiments, the neutralizing agent is a reducing agent. In some embodiments, the reducing agent is dithiothreitol (DTT), tris(2-carboxyethyl) phosphine (TCEP), beta-mercaptoethanol (BME), or a cysteine, or any mixture thereof. In some embodiments, the neutralizing agent is added in an amount to fully quench the amount of the alkylating agent, such as in an amount greater than or equal to a molar amount of an active moiety of the alkylating agent. In some embodiments, the amount (as assessed based on the final concentration in the sample containing solution) of the neutralizing agent is about 1 mM to about 100 mM.

[0676] In some embodiments, the alkylation technique, in whole or in part, is performed substantially in a low light condition. In some embodiments, the alkylation incubation time is performed in a low light condition. In some embodiments, the low light condition is in the dark or a location substantially devoid of sunlight and/or room lighting, such as in a desk drawer. In some embodiments, the low light condition is a filtered light, such as red light.

[0677] In some embodiments, the alkylating agent is sourced from a stock solution. In some embodiments, the stock solution is prepared within about 1 hour, such as within about any of 50 minutes, 40 minutes, 30 minutes, 20 minutes, or 10 minutes, of use.

[0678] In some embodiments, the ramp rate between a temperature change in a thermal cycle (such as between a block starting temperature and a block set temperature and/or between a block set temperature a the block ending temperature) is about 1° C./second to about 10° C./second, such as any of 1° C./second, 1.5° C./second, 2° C./second, 2.5° C./second, 3° C./second, 3.5° C./second, 4° C./second, 4.5° C./second, 5° C./second, 5.5° C./second, 6° C./second, 6.5° C./second, 7° C./second, 7.5° C./second, 8° C./second, 8.5° C./second, 9° C./second, 9.5° C./second, or 10° C./second.

### IV. Proteolytic Digestion Techniques

[0679] In certain aspects, the methods provided herein comprise performing a proteolytic digestion technique. In some embodiments, the proteolytic digestion technique is performed on a sample, or a derivative thereof, following thermal denaturation and/or any additional steps intended to expose protease cleavage sites. Proteolytic digestion techniques, generally speaking, cleave polypeptides at known cleavage sites. For example, trypsin is a serine protease that generally cleaves polypeptides at the carboxyl side (C-terminal side) of lysine and arginine residues. Certain exceptions apply to the cleavage pattern of trypsin, such as due to proximity of a proline residue and/or a post-translational modification causing steric hindrance relative to the cleavage site. Proteolytic digestion techniques described herein comprise subjecting a sample, or a derivative thereof (e.g., a denatured sample or an alkylated sample, including an alkylated sample subjected to a reduction technique prior to an alkylation technique), to an amount of one or more proteases and incubating for a digestion incubation time performed at a temperature or range thereof.

[0680] In some embodiments, each of the one or more proteases is trypsin, LysC, LysN, AspN, GluC, ArgC, IdeS, IdeZ, PNGase F, thermolysin, pepsin, elastase, TEV, or Factor Xa, or any mixture thereof. In some embodiments, wherein two or more proteases are used, the weight ratio between a first protease and a second protease is about 1:10 to about 10:1, such as about any of about 1:9, 1:8, 1:7: 1:6, 1:5, 1:4, 1:3, 1:2, or 1:1. In some embodiments, the one or more proteases is trypsin. In some embodiments, the one or more proteases is a mixture of trypsin and LysC, such as in a weight ratio of about 1:1. In some embodiments, the one or more proteases is selected based on the type and/or characteristic of a blood sample, or components thereof, used in the methods herein. In some embodiments, the blood sample is processed by the absorbent or bibulous member such that a plasma sample is obtained, wherein the one or more proteases is trypsin and Lys-C, such as in a weight ratio of about 1:1. In some embodiments, the blood sample is processed by the absorbent or bibulous member such that a serum sample is obtained, wherein the one or more proteases is trypsin. In some embodiments, the protease is a modified protease, such as comprising a modification to prevent or inhibit self-proteolysis. In some embodiments, the modified protease is a modified trypsin, such as a methylated and/or an acetylated trypsin. In some embodiments, the modified trypsin is a tosyl phenylalanyl chloromethyl ketone (TPCK)-treated trypsin.

[0681] In some embodiments, the amount of a protease, e.g., trypsin or LysC, used in a proteolytic digestion technique is based on a weight ratio relative to the polypeptide content of a sample, or a derivative thereof, (i.e., weight of a protease: weight of polypeptide content) of about 1:200 to about 1:10, such as any of about 1:100 to about 1:10, about 1:50 to about 1:10, about 1:40 to about 1:20, about 1:50 to about 1:30, about 1:45 to about 1:35, about 1:20 to about 1:40, about 1:30 to about 1:10, or about 1:25 to about 1:15. In some embodiments, the amount of a protease used in a proteolytic digestion technique is at least about 1:200, such as at least about any of 1:190, 1:180, 1:170, 1:160, 1:150, 1:140, 1:130, 1:120, 1:110, 1:100, 1:95, 1:90, 1:85, 1:80, 1:75, 1:70, 1:65, 1:60, 1:55, 1:50, 1:45, 1:40, 1:35, 1:30, 1:25, 1:20, 1:15, or 1:10. In some embodiments, the amount of a protease used in a proteolytic digestion technique is about 1:10 or less, such as about any of 1:15 or less, 1:20 or less, 1:25 or less, 1:30 or less, 1:35 or less, 1:40 or less, 1:45 or less, 1:50 or less, 1:55 or less, 1:60 or less, 1:65 or less, 1:70 or less, 1:75 or less, 1:80 or less, 1:85 or less, 1:90 or less, 1:95 or less, 1:100 or less, 1:110 or less, 1:120 or less, 1:130 or less, 1:140 or less, 1:150 or less, 1:160 or less, 1:170 or less, 1:180 or less, 1:190 or less, or 1:200 or less. In some embodiments, the amount of a protease used in a proteolytic digestion technique is about any of 1:10, 1:15, 1:20, 1:25, 1:30, 1:35, 1:40, 1:45, 1:50, 1:55, 1:60, 1:65, 1:70, 1:75, 1:80, 1:85, 1:90, 1:95, 1:100, 1:110, 1:120, 1:130, 1:140, 1:150, 1:160, 1:170, 1:180, 1:190, or 1:200. In some embodiments, the proteolytic digestion technique comprises the use of two or more proteases, such as a combination of trypsin and LysC, and in such embodiments, the amount of each protease (such as described above) can be summed to a total amount of proteases used in a proteolytic digestion technique.

[0682] In some embodiments, the proteolytic digestion incubation time is about 20 minutes to about 36 hours, such as any of about 1 hour to about 18 hours, about 5 hours to about 24 hours, about 12 hours to about 24 hours, about 16 hours to about 20 hours, or about 12 hours to about 36 hours. In some embodiments, the proteolytic digestion incubation time is about 36 hours or less, such as about any of 32 hours or less, 30 hours or less, 28 hours or less, 26 hours or less, 24 hours or less, 22 hours or less, 20 hours or less, 19 hours or less, 18 hours or less, 17 hours or less, 16 hours or less, 15 hours or less, 14 hours or less, 13 hours or less, 12 hours or less, 11 hours or less, 10 hours or less, 9 hours or less, 8 hours or less, 7 hours or less, 6 hours or less, 5 hours or less, 4 hours or less, 3 hours or less, 2 hours or less, or 1 hour or less. In some embodiments, the proteolytic digestion incubation time is at least about 20 minutes, such as at least about any of 30 minutes, 40 minutes, 50 minutes, 1 hour, 2 hours, 3 hours, 4 hours, 5 hours, 6 hours, 7 hours, 8 hours, 9 hours, 10 hours, 11 hours, 12 hours, 13 hours, 14 hours, 15 hours, 16 hours, 17 hours, 18 hours, 19 hours, 20 hours, 22 hours, 24 hours, 26 hours, 28 hours, 30 hours, 32 hours, 34 hours, or 36 hours. In some embodiments, the proteolytic digestion incubation time is about any of 20 minutes, 30 minutes, 40 minutes, 50 minutes, 1 hour, 2 hours, 3 hours, 4 hours, 5 hours, 6 hours, 7 hours, 8 hours, 9 hours, 10 hours, 11 hours, 12 hours, 13 hours, 14 hours, 15 hours, 16 hours, 17 hours, 18 hours, 19 hours, 20 hours, 22 hours, 24 hours, 26 hours, 28 hours, 30 hours, 32 hours, 34 hours, or 36 hours.

[0683] In some embodiments, the digestion incubation time is performed at a temperature of about 20° C. to about 60° C., such as any of about 20° C. to about 25° C., about 20° C. to about 30° C., about 25° C. to about 40° C., about 35° C. to about 40° C., or about 35° C. to about 50° C. In some embodiments, the digestion incubation time is performed at a temperature of at least about 20° C., such as at least about any of 21° C., 22° C., 23° C., 24° C., 25° C., 26° C., 27° C., 28° C., 29° C., 30° C., 31° C., 32° C., 33° C., 34° C., 35° C., 36° C., 37° C., 38° C., 39° C., 40° C., 42° C., 44° C., 46° C., 48° C., 50° C., 52° C., 54° C., 56° C., 58° C., or 60° C. In some embodiments, the digestion incubation time is performed at a temperature of about 60° C. or less, such about any of 58° C. or less, 56° C. or less, 54° C. or less, 52° C. or less, 50° C. or less, 48° C. or less, 46° C. or less, 44° C. or less, 42° C. or less, 40° C. or less, 39° C. or less, 38° C. or less, 37° C. or less, 36° C. or less, 35° C. or less, 34° C. or less, 33° C. or less, 32° C. or less, 31° C. or less, 30° C. or less, 29° C. or less, 28° C. or less, 27° C. or less, 26° C. or less, 25° C. or less, 24° C. or less, 23° C. or less, 22° C. or less, 21° C. or less, or 20° C. or less. In some embodiments, the digestion incubation time is performed at a temperature of about any of 20° C., 21° C., 22° C., 23° C., 24° C., 25° C., 26° C., 27° C., 28° C., 29° C., 30° C., 31° C., 32° C., 33° C., 34° C., 35° C., 36° C., 37° C., 38° C., 39° C., 40° C., 42° C., 44° C., 46° C., 48° C., 50° C., 52° C., 54° C., 56° C., 58° C., or 60° C. In some embodiments, the reduction incubation time is performed at a room temperature.

[0684] In some embodiments, the proteolytic digestion technique comprises a digestion incubation time of about 12 hours to about 24 hours, such as about any of 13 hours, 14 hours, 15 hours, 16 hours, 17 hours, 18 hours, 19 hours, 20 hours, 21 hours, 22 hours, 23 hours, wherein the digestion incubation time is performed at a temperature of about 20° C. to about 40° C., such about any of 22° C., 24° C., 26° C., 28° C., 30° C., 31° C., 32° C., 33° C., 34° C., 35° C., 36° C., 37° C., 38° C., 39° C. In some embodiments, the proteolytic digestion technique comprises use of an amount a protease for each of one or more proteases, e.g., trypsin and/or LysC, of about 1:15 to about 1:45, such as about any of 1:20, 1:25, 1:30, 1:35, or 1:40 (as measured based on the amount of the protease to the amount of polypeptide in a sample or a derivative thereof), and a digestion incubation time of about 12 hours to about 24 hours, such as about any of 13 hours, 14 hours, 15 hours, 16 hours, 17 hours, 18 hours, 19 hours, 20 hours, 21 hours, 22 hours, 23 hours, wherein the digestion incubation time is performed at a temperature of about 20° C. to about 40° C., such about any of 22° C., 24° C., 26° C., 28° C., 30° C., 31° C., 32° C., 33° C., 34° C., 35° C., 36° C., 37° C., 38° C., 39° C. In some embodiments, the proteolytic digestion technique is performed on a plasma sample or a derivate thereof, wherein the proteolytic digestion technique comprises a 1:40 ratio of trypsin to polypeptide in the sample of the derivative thereof and a 1:40 ratio of LysC to polypeptide in the sample or the derivative thereof. In some embodiments, the proteolytic digestion technique is performed on a serum sample or a derivate thereof, wherein the proteolytic digestion technique comprises a 1:20 ratio of trypsin.

[0685] The digestion incubation temperature can be controlled by numerous techniques and combinations thereof. In some embodiments, the digestion incubation temperature is controlled by an ambient temperature, such as room temperature. In some embodiments, the digestion incubation temperature is controlled by a water bath. In some embodiments, the digestion incubation temperature is controlled by a heat block. In some embodiments, the digestion incubation temperature is controlled by a thermocycler, e.g., a thermocycler with a lid temperature control element. As described herein, in some embodiments, control of sample temperature when performed using a thermocycler is via a temperature block element. In some embodiments, temperature changes prior to and/or after the digestion incubation time temperature are controlled by a technique described herein, such as cooling at room temperature or a ramp rate.

[0686] In some embodiments, the proteolytic digestion technique comprises subjecting a sample, or a derivative thereof, e.g., an alkylated sample (including an alkylated sample quenched with a neutralizing agent), to a thermal cycle. In some embodiments, the thermal cycle comprises subjecting the sample, or a derivative thereof, to one or more of: (a) a block starting temperature (b) block set temperature (the temperature for the digestion incubation time); (c) a block ending temperature; (d) one or more ramp rates between temperature changes in the thermal cycle (such as between the block starting temperature and the block set temperature or between the block set temperature and the block ending temperature); and (e) a lid temperature relative to the block temperature. In some embodiments, the thermal cycle is performed, in whole or in part, using a thermocycler. In some embodiments, the thermal cycle is configured to reduce and/or prevent loss of sample, such as by escaping vapor and/or condensation when the sample container is opened. In some embodiments, the thermal cycle comprises a set block temperature of about 20° C. to about 50° C., including about any of 22° C., 24° C., 26° C., 28° C., 30° C., 31° C., 32° C., 33° C., 34° C., 35° C., 36° C., 37° C., 38° C., 39° C., 40° C., 42° C., 44° C., 46° C., or 48° C.

[0687] In some embodiments, the thermal cycle comprises: (a) a set block temperature of about 20° C. to about 50° C., including about any of 22° C., 24° C., 26° C., 28° C., 30° C., 31° C., 32° C., 33° C., 34° C., 35° C., 36° C., 37° C., 38° C., 39° C., 40° C., 42° C., 44° C., 46° C., or 48° C., and (b) a block ending temperature of about 15° C. to about 35° C., such as any of about 20° C. to about 35° C., or about 20° C. to about 25° C. In some embodiments, the thermal cycle comprises: (a) starting block temperature of about 15° C. to about 35° C., such as any of about 20° C. to about 35° C., or about 20° C. to about 25° C., (b) a set block temperature of about 20° C. to about 50° C., including about any of 22° C., 24° C., 26° C., 28° C., 30° C., 31° C., 32° C., 33° C., 34° C., 35° C., 36° C., 37° C., 38° C., 39° C., 40° C., 42° C., 44° C., 46° C., or 48° C., and (c) a block ending temperature of about 15° C. to about 35° C., such as any of about 20° C. to about 35° C., or about 20° C. to about 25° C. In any of the thermal cycles described herein, in some embodiments, the lid temperature during the thermal cycle is configured to reduce and/or inhibit condensate formation near or on the lid of a sample container. In some embodiments, the lid temperature during the thermal cycle is at least about 2° C., such as at least about any of 2.5° C., 3° C., 3.5° C., 4° C., 4.5° C., 5° C., 5.5° C., 6° C., 6.5° C., 7° C., 7.5° C., 8° C., 8.5° C., 9° C., 9.5° C., 10° C., 11° C., 12° C., 13° C., 14° C., 15° C., 16° C., 17° C., 18° C., 19° C., or 20° C., higher than the respective temperature of the block during the thermal cycle. In some embodiments, the lid temperature during at least a portion of a thermal cycle is about 102° C. to about 120° C., such as about any of 103° C., 104° C., 105° C., 106° C., 107° C., 108° C., 109° C., or 110° C.

[0688] In some embodiments, the ramp rate between a temperature change in a thermal cycle (such as between a block starting temperature and a block set temperature and/or between a block set temperature a the block ending temperature) is about 1° C./second to about 10° C./second, such as any of 1° C./second, 1.5° C./second, 2° C./second, 2.5° C./second, 3° C./second, 3.5° C./second, 4° C./second, 4.5° C./second, 5° C./second, 5.5° C./second, 6° C./second, 6.5° C./second, 7° C./second, 7.5° C./second, 8° C./second, 8.5° C./second, 9° C./second, 9.5° C./second, or 10° C./second.

[0689] In some embodiments, the proteolytic digestion technique further comprises quenching the one or more proteolytic enzymes. In some embodiments, quenching the one or more proteolytic enzymes comprises denaturing the one or more proteolytic enzymes. In some embodiments, quenching the one or more proteolytic enzymes comprise adding an amount of an acid. In some embodiments, the acid is formic acid (FA) or trifluoroacetic acid (TFA), or a mixture thereof. In some embodiments, the amount (as assessed based on the final concentration in the sample containing solution) of the acid added is about any of 0.1% v/v, 0.2% v/v, 0.3% v/v, 0.4% v/v, 0.5% v/v, 0.6% v/v, 0.7% v/v, 0.8% v/v, 0.9% v/v, 1% v/v, 1.1% v/v, 1.2% v/v, 1.3% v/v, 1.4% v/v, 1.5% v/v, 1.6% v/v, 1.7% v/v, 1.8% v/v, 1.9% v/v, or 2% v/v.

### V. Additional Techniques

[0690] In certain aspects, the method provided herein comprise subjecting the proteolytically digested sample comprising a proteolytic glycopeptide to one or more additional steps prior to subjecting the proteolytically digested sample, or a derivative thereof, to a liquid chromatography-mass spectrometry (LC-MS) technique using a liquid chromatography system and a mass spectrometer. In some embodiments, the LC system is online with the MS (i.e., eluate from the LC system is directly introduced to the MS). In some embodiments, the one or more additional steps do not include a desalting step performed outside of the LC system (such as an offline desalting technique).

[0691] In some embodiments, the method further comprises adding a standard to the proteolytically digested sample prior to the LC-MS technique. In some embodiments, the standard is a stable isotope-internal standard (SI-IS) peptide mixture.

[0692] In some embodiments, the biological sample is not subjected to a high-abundant protein depletion technique prior to the thermal denaturation technique. For example, in some embodiments, the high-abundant protein depletion technique removes highly abundant proteins present in a blood sample, such as serum albumin.

### E4. Methods for Performing a LC-MS Analysis of a Proteolytic Glycopeptide

[0693] In certain aspects, provided herein is a method for performing a LC-MS analysis on a sample comprising a proteolytic glycopeptide.

[0694] In some embodiments, the liquid chromatography (LC) system is online with a mass spectrometer (i.e., proteolytic peptide species, including glycopeptides, are eluted from the LC system directing into the mass spectrometer via a mass spectrometer interface. In some embodiments, the LC technique comprises performing a chromatographic separation of one or more proteolytic peptides, including glycopeptides. In some embodiments, the one or more proteolytic peptides subjected to a chromatographic separation are obtained from a proteolytically digested sample, such as described herein. In some embodiments, the chromatographic separation is performed on a proteolytically digested sample, such as described herein, (e.g., no additional separation technique, such as a sample clean-up step, is performed to remove one or more components from proteolytically digested sample). In some embodiments, the chromatographic separation is performed on a proteolytically digested sample comprising at least about 5 mM of a buffer, such as ammonium bicarbonate. In some embodiments, the chromatographic separation is performed on a proteolytically digested sample comprising an amount, such as at least about 1 mM, of a reducing agent or a byproduct thereof, such as a stable six-membered ring with an internal disulfide bond derived from DTT. In some embodiments, the chromatographic separation is performed on a proteolytically digested sample comprising an amount, such as at least about 1 mM, of an alkylating agent or a byproduct thereof, such as iodide (I-) derived from IAA.

[0695] In some embodiments, the method comprises introducing the proteolytically digested sample to a LC-MS system. In some embodiments, the method comprises performing a chromatographic separation of the proteolytically digested sample. In some embodiments, the chromatography separation comprises a period of diversion (i.e., diverted from the mass spectrometer interface, e.g., to a waste receptacle) of an initial eluate from the proteolytically digested sample. In some embodiments, the initial eluate (as assessed from the sample front) diverted from the mass spectrometer is about 1 column volume of the chromatographic column to about 5 column volumes of the chromatographic column, such as any of about 1 column volume to about 4 column volumes, about 2 column volumes to about 5 column volumes, or about 3 column volumes to about 4 column volumes. In some embodiments, the initial eluate (as assessed from the sample front) diverted from the mass spectrometer is at least about 0.5 column volumes, such as at least about any of 1 column volume, 1.5 column volumes, 2 column volumes, 2.5 column volumes, 3 column volumes, 3.5 column volumes, 4 column volumes, 4.5 column volumes, or 5 column volumes. In some embodiments, the initial eluate (as assessed from the sample front) diverted from the mass spectrometer is about 5 column volumes or less, such as about any of 4.5 column volumes or less, 4 column volumes or less, 3.5 column volumes or less, 3 column volumes or less, 2.5 column volumes or less, 2 column volumes or less, 1.5 column volumes or less, 1 column volume or less, or 0.5 column volume or less. In some embodiments, the initial eluate (as assessed from the sample front) diverted from the mass spectrometer is about any of 0.5 column volume, 1 column volume, 1.5 column volumes, 2 column volumes, 2.5 column volumes, 3 column volumes, 3.5 column volumes, 4 column volumes, 4.5 column volumes, or 5 column volumes.

[0696] In some embodiments, the proteolytically digest sample is subjected to a solid phase extraction column comprising a reversed phase material prior to subjecting the polypeptide content therein to a LC-MS analysis In some embodiments, the reversed-phase medium comprises an alkyl-based moiety, such as an alkyl-based moiety comprising an octadecyl carbon functional group (C18) covalently bound to a silica solid phase. In some embodiments, the silica solid phase comprises a plurality of particles having an average largest cross-sectional distance (such as a diameter, e.g., as measured by dynamic light scattering) of about 20 μm. In some embodiments, each particle of the plurality of particles comprises an average pore size of about 150 Å, and wherein the pores are derivitized with the alkyl-based moiety. In some embodiments, the solid phase extraction column comprising the reversed-phase medium has a column volume of about 5 μL. In some embodiments, the solid phase extraction column is an AssayMap 5 μL C18 cartridge (catalog no. 5190-6532; Agilent Technologies). In some embodiments, the reversed-phase medium comprises an underivitized polystyrene divinylbenzene hydrophobic reversed-phase resin. In some embodiments, the polystyrene divinylbenzene hydrophobic reversed-phase resin comprises a plurality of particles having an average largest cross-sectional distance (such as a diameter, e.g., as measured by dynamic light scattering) of about 20 μm. In some embodiments, each particle of the plurality of particles comprises an average pore size of about 100 Å. In some embodiments, the solid phase extraction column comprising the reversed-phase medium has a column volume of about 5 μL. In some embodiments, the solid phase extraction column is an AssayMAP 5 μL Reversed Phase (RP-S) cartridge (catalog no. G5496-60033; Agilent Technologies).

[0697] In some embodiments, the column volume refers to the volume occupied by the reversed-phase media within the sample phase extraction column or cartridge. The reversed-phase media can be referred to as a bed that is compacted within a chromatography column to form a bed volume.

[0698] In some embodiments, the chromatographic separation comprises a gradient separation performing using mixtures of an aqueous mobile phase and an organic mobile phase. In some embodiments, the chromatographic separation comprises isocratic period, such as a period of at least about 90%, such as at least about any of 91%, 92%, 93%, 94%, 95%, 96%, 97%, 98%, 99%, or 100%, of an aqueous mobile phase to produce the initial eluate that is diverted from the mass spectrometer interface.

[0699] In some embodiments, the LC system comprises a reversed-phase chromatography column. In some embodiments, the reversed-phase column comprises an alkyl moiety, such as C18.

[0700] The present application contemplates a diverse array of additional features of LC-MS techniques for analyzing a sample comprising a glycopeptide using a mass spectrometer. In some embodiments, the liquid chromatography system comprises a high performance liquid chromatography system. In some embodiments, the liquid chromatography system comprises an ultra-high performance liquid chromatography system. In some embodiments, the liquid chromatography system comprises a high-flow liquid chromatography system. In some embodiments, the liquid chromatography system comprises a low-flow liquid chromatography system, such as a micro-flow liquid chromatography system or a nano-flow liquid chromatography system. In some embodiments, the liquid chromatography system is coupled, such as directly interfaced, with a mass spectrometer.

[0701] In some embodiment, the mass spectrometry technique comprises an ionization technique. Ionization techniques contemplated by the present application include techniques capable of charging polypeptides and peptide products, including glycopeptides. Thus, in some embodiments, the ionization technique is electrospray ionization. In some embodiments, the ionization technique is nano-electrospray ionization. In some embodiments, the ionization technique is atmospheric pressure chemical ionization. In some embodiments, the ionization technique is atmospheric pressure photoionization.

[0702] A diverse array of mass spectrometers are contemplated as compatible with the description, include high-resolution mass spectrometers and low-resolution mass spectrometers. In some embodiments, the mass spectrometer is a time-of-flight (TOF) mass spectrometer. In some embodiments, the mass spectrometer is a quadrupole time-of-flight (Q-TOF) mass spectrometer. In some embodiments, the mass spectrometer is a quadrupole ion trap time-of-flight (QIT-TOF) mass spectrometer. In some embodiments, the mass spectrometer is an ion trap. In some embodiments, the mass spectrometer is a single quadrupole. In some embodiments, the mass spectrometer is a triple quadrupole (QQQ). In some embodiments, the mass spectrometer is an orbitrap. In some embodiments, the mass spectrometer is a quadrupole orbitrap. In some embodiments, the mass spectrometer is a Fourier transform ion cyclotron resonance (FT) mass spectrometer. In some embodiments, the mass spectrometer is a quadrupole Fourier transform ion cyclotron resonance (Q-FT) mass spectrometer. In some embodiments, the mass spectrometry technique comprises positive ion mode. In some embodiments, the mass spectrometry technique comprises negative ion mode. In some embodiments, the mass spectrometry technique comprises an ion mobility mass spectrometry technique.

[0703] In some embodiments, the LC-MS technique comprises processing obtained signals MS from the mass spectrometer. In some embodiments, the LC-MS technique comprises peak detection. In some embodiments, the LC-MS technique comprises determining ionization intensity of an ionized peptide product. In some embodiments, the LC-MS technique comprises determining peak height of an ionized peptide product. In some embodiments, the LC-MS technique comprises determining peak area of an ionized peptide product. In some embodiments, the LC-MS technique comprises determining peak volume of an ionized peptide product. In some embodiments, the LC-MS technique comprises identifying an ionized peptide product by amino acid sequence. In some embodiments, the LC-MS technique comprises determining the site of a post-translational modification of an ionized peptide, such as the site of a glycosylation. In some embodiments, the LC-MS technique comprises determining the glycan structure, or a characteristic thereof, of an ionized peptide product. In some embodiments, the LC-MS technique comprises manually validating the ionized peptide product acid sequence assignments. In some embodiments, the LC-MS technique comprises a quantification technique.

F4. Ovarian Cancer Biomarkers for Samples from Absorbent or Bibulous Members and Methods Thereof

[0704] In some embodiments, provided herein are methods for diagnosing a pelvic tumor (such as ovarian cancer) comprising detecting one or more biomarkers. In some embodiments, the one or more biomarkers comprise one or more glycopeptides. In some embodiments, the one or more biomarkers comprises one or more peptide structures set forth in Table 9. In some embodiments, the method comprises detecting one or more glycopeptides comprising a sequence set forth in SEQ ID NOs: 35-51. In some embodiments, the method comprises detecting one or more glycopeptides comprising a sequence set forth in SEQ ID NOs: 35-42. In some embodiments, the method comprises detecting one or more glycopeptides comprising a sequence set forth in SEQ ID NOs: 35-40. In some embodiments, the method comprises detecting one or more glycopeptides comprising a sequence set forth in SEQ ID NOs: 43-51. In some embodiments, the glycopeptide comprises a glycan with the structure 6513 in Table 10. In some embodiments, the diagnosis is a determination of whether the individual has a benign or malignant tumor. In some embodiments, the tumor is ovarian cancer.

[0705] In some embodiments, the diagnosis is based upon presence and/or amount of at least one, at least two, at least three, at least four, at least five, at least six, at least seven or eight peptide structures from Table 9. In some embodiments, the diagnosis is based upon the presence and/or amount of one or more peptides comprising the amino acid sequence of SEQ ID NOs: 35-42. In some embodiments, the diagnosis is based upon the presence and/or amount of two or more peptides comprising the amino acid sequence of SEQ ID NOs: 35-42. In some embodiments, the diagnosis is based upon the presence and/or amount of three or more peptides comprising the amino acid sequence of SEQ ID NOs: 35-42. In some embodiments, the diagnosis is based upon the presence and/or amount of four or more peptides comprising the amino acid sequence of SEQ ID NOs: 35-42. In some embodiments, the diagnosis is based upon the presence and/or amount of five or more peptides comprising the amino acid sequence of SEQ ID NOs: 35-42. In some embodiments, the diagnosis is based upon the presence and/or amount of six or more peptides comprising the amino acid sequence of SEQ ID NOs: 35-42. In some embodiments, the diagnosis is based upon the presence and/or amount of seven or more peptides comprising the amino acid sequence of SEQ ID NOs: 35-42. In some embodiments, the diagnosis is based upon the presence and/or amount of each of the peptides comprising the amino acid sequence of SEQ ID NOs: 35-42.

[0706] In some embodiments, the diagnosis is based upon the presence and/or amount of one or more peptides consisting of the amino acid sequence of SEQ ID NOs: 35-42. In some embodiments, the diagnosis is based upon the presence and/or amount of two or more peptides consisting of the amino acid sequence of SEQ ID NOs: 35-42. In some embodiments, the diagnosis is based upon the presence and/or amount of three or more peptides consisting of the amino acid sequence of SEQ ID NOs: 35-42. In some embodiments, the diagnosis is based upon the presence and/or amount of four or more peptides consisting of the amino acid sequence of SEQ ID NOs: 35-42. In some embodiments, the diagnosis is based upon the presence and/or amount of five or more peptides consisting of the amino acid sequence of SEQ ID NOs: 35-42. In some embodiments, the diagnosis is based upon the presence and/or amount of six or more peptides consisting of the amino acid sequence of SEQ ID NOs: 35-42. In some embodiments, the diagnosis is based upon the presence and/or amount of seven or more peptides consisting of the amino acid sequence of SEQ ID NOs: 35-42. In some embodiments, the diagnosis is based upon the presence and/or amount of each of the peptides consisting of the amino acid sequence of SEQ ID NOs: 35-42.

[0707] In some embodiments, the diagnosis is based upon the presence and/or amount of one or more peptides comprising the amino acid sequence of SEQ ID NOs: 43-51. In some embodiments, the diagnosis is based upon the presence and/or amount of two or more peptides comprising the amino acid sequence of SEQ ID NOs: 43-51. In some embodiments, the diagnosis is based upon the presence and/or amount of three or more peptides comprising the amino acid sequence of SEQ ID NOs: 43-51. In some embodiments, the diagnosis is based upon the presence and/or amount of four or more peptides comprising the amino acid sequence of SEQ ID NOs: 43-51. In some embodiments, the diagnosis is based upon the presence and/or amount of five or more peptides comprising the amino acid sequence of SEQ ID NOs: 43-51. In some embodiments, the diagnosis is based upon the presence and/or amount of six or more peptides comprising the amino acid sequence of SEQ ID NOs: 43-51. In some embodiments, the diagnosis is based upon the presence and/or amount of seven or more peptides comprising the amino acid sequence of SEQ ID NOs: 43-51. In some embodiments, the diagnosis is based upon the presence and/or amount of each of the peptides comprising the amino acid sequence of SEQ ID NOs: 43-51.

[0708] In some embodiments, the diagnosis is based upon the presence and/or amount of one or more peptides consisting of the amino acid sequence of SEQ ID NOs: 43-51. In some embodiments, the diagnosis is based upon the presence and/or amount of two or more peptides consisting of the amino acid sequence of SEQ ID NOs: 43-51. In some embodiments, the diagnosis is based upon the presence and/or amount of three or more peptides consisting of the amino acid sequence of SEQ ID NOs: 43-51. In some embodiments, the diagnosis is based upon the presence and/or amount of four or more peptides consisting of the amino acid sequence of SEQ ID NOs: 43-51. In some embodiments, the diagnosis is based upon the presence and/or amount of five or more peptides consisting of the amino acid sequence of SEQ ID NOs: 43-51. In some embodiments, the diagnosis is based upon the presence and/or amount of six or more peptides consisting of the amino acid sequence of SEQ ID NOs: 43-51. In some embodiments, the diagnosis is based upon the presence and/or amount of seven or more peptides consisting of the amino acid sequence of SEQ ID NOs: 43-51. In some embodiments, the diagnosis is based upon the presence and/or amount of each of the peptides consisting of the amino acid sequence of SEQ ID NOs: 43-51.

[0709] In some embodiments, provided herein is a method of treating ovarian cancer in an individual based upon the presence, absence, or amount of one or more peptide structures set forth in Table 9. In some embodiments, one or more peptide structures set forth in SEQ ID NOs: 35-42 is detected. In some embodiments, one or more peptide structures set forth in SEQ ID NOs: 35-40 is detected. In some embodiments, one or more peptide structures set forth in SEQ ID NOs: 43-51 is detected. In some embodiments, the method further comprises delivering a therapeutic agent based upon the presence, absence, or amount of one or more peptide structures set forth in Table 9. In some embodiments, the method comprises selecting a therapeutic agent based upon the presence, absence, or amount of one or more peptide structures set forth in Table 9. In some embodiments, the therapeutic agent is a chemotherapeutic agent and/or a hormone therapy.

### G4. Exemplary Methods

[0710] In some embodiments, provided herein is a method of classifying a biological sample obtained from a subject with respect to a plurality of states associated with a pelvic cancer or a method of determining a state associated with a pelvic cancer comprising detecting one or more peptide structures set forth in Table 9, such as SEQ ID NOs: 35-42, SEQ ID NOs: 35-40 or SEQ ID NOs: 43-51. In some embodiments, the sample is derived from blood. In some embodiments, the sample is from an absorbent or bibulous member, such as a dried blood spot card. In some embodiments, the absorbent or bibulous member comprises one or more polypeptide standards described herein. In some embodiments, the absorbent or bibulous member comprised one or more polypeptide standards prior to deposition of the blood. In some embodiments, the method further comprises processing a portion of the dried blood spot for mass spectrometry. In some embodiments, the method comprises extracting polypeptides from a portion the absorbent or bibulous member. In some embodiments, the method comprises proteolytic processing extracted polypeptides. In some embodiments, the method comprises digestion with a protease. In some embodiments, the method comprises digestion with trypsin. In some embodiments, the absorbent or bibulous member is filter paper or cellulose. In some embodiments, the absorbent or bibulous member is a material that prevents hemolysis.

[0711] In some embodiments, the method further comprises performing mass spectrometry on the sample to detect one or more peptide structures set forth in Table 9, such as SEQ ID NOs: 35-42, SEQ ID NOs: 35-40, or SEQ ID NOs: 43-51. In some embodiments, the mass spectrometry is LC-MS. In some embodiments, the mass spectrometry is MRM-MS. In some embodiments, one or more parameters set forth in Table 11 is detected.

### H4. Samples and Components Thereof

[0712] The methods provided herein are contemplated to be suitable for analyzing a diverse array of samples, such as any blood samples or derivatives thereof obtained using an absorbent or bibulous member, such as a blood spot card. In some embodiments, the sample is a blood sample, such as a whole blood sample. In some embodiments, the blood sample is processed, such as by the absorbent or bibulous member, e.g., a lateral flow dried blood collection device. In some embodiments, the blood sample is a plasma sample. In some embodiments, the blood sample is a serum sample. In some embodiments, the sample is a tumor tissue. In some embodiments, the sample is from a subject suspected of having a pelvic tumor. In some embodiments, the sample is from a subject suspected of having ovarian cancer.

[0713] The methods provided herein are particularly useful for the analysis of blood samples, or portion thereof, comprising a glycoprotein, such as to generate glycopeptide containing specimens for analysis with a mass spectrometer.

[0714] In some embodiments, the method comprises an upstream sample preparation technique, such as for obtaining plasma or serum from a blood sample, performed prior to methods for proteolytically digesting a sample. In some embodiments, the upstream sample preparation technique comprises a cell lysis step. In some embodiments, the upstream sample preparation technique comprises a filtration step. In some embodiments, the upstream sample preparation technique comprises a dilution step. In some embodiments, the upstream sample preparation technique comprises a protein concentration determination step.

[0715] In some embodiments, the sample is obtained from an individual. In some embodiments, the sample is obtained from a human individual.

### I4. Systems, Kits, and Compositions

[0716] In certain aspects, contemplated herein are systems, kits, and compositions useful for performing the methods described herein. In some embodiments, provided herein is a system, kit, and/or composition useful for performing a proteolytic digestion of a blood sample, or a portion thereof, comprising a glycoprotein as described herein. In some embodiments, provided herein is a system, kit, and/or composition useful for performing a LC-MS analysis of a proteolytic glycopeptide as described herein. In some embodiments, provided herein is a system, kit, and/or composition useful for performing a proteolytic digestion of a blood sample, or a portion thereof, comprising a glycoprotein followed by LC-MS analysis of the proteolytic glycopeptide produced therefrom.

[0717] The present invention is not intended to be limited in scope to the particular disclosed embodiments, which are provided, for example, to illustrate various aspects of the invention. Various modifications to the compositions and methods described will become apparent from the description and teachings herein. Such variations may be practiced without departing from the true scope and spirit of the disclosure and are intended to fall within the scope of the present disclosure.

### Section 5—HILIC Enrichment Sample Preparation for Quantitative Mass Spectrometry

[0718] Provided herein, in certain aspects, are methods for processing a proteolytic digest sample for use in a liquid chromatography-mass spectrometry (LC-MS) analysis, the methods comprising loading a hydrophilic interaction liquid chromatography (HILIC) load derived from the proteolytic digest sample to a solid phase extraction column comprising a HILIC medium according to one or more conditions to associate the at least one proteolytically digested glycopeptide with the HILIC medium. The disclosure of the present application is based on the inventors' unique perspective and unexpected findings regarding methods for processing a proteolytic digest sample that provide an improved LC-MS analysis of glycopeptides, the methods comprising loading a HILIC load according to one or more of the following conditions: (1) the loading of the HILIC load to the solid phase extraction column is initiated when the HILIC medium is in a dry state; (2) the HILIC load loaded to the solid phase extraction column has an amount of the plurality of proteolytically digested peptides characterized by one or both of: (a) a ratio of the weight of the plurality of proteolytically digested peptides over the weight of the HILIC medium in the dry state of at least about 0.05, including at least about 0.06; and/or (b) a ratio of the weight of the plurality of proteolytically digested peptides relative to the bed volume of the HILIC medium in the dry state of at least about 30 μg/μl, including at least about 40 μg/μl; or (3) the HILIC load loaded to the solid phase extraction column has a concentration of an organic solvent of at least about 70% (v/v). The methods taught herein were demonstrated to enrich glycopeptide species derived from a proteolytic digest sample such that results from LC-MS analysis were significantly improved as compared to conventional glycopeptide LC-MS analyses. As demonstrated herein, in certain aspects the processing methods taught herein enable accurate and robust glycopeptide quantification. The results provided herein demonstrate high-throughput HILIC enrichment methods that allowed selective identification and reproducible quantification of glycopeptides from complex biologic matrices such as serum/plasma, and represent significant advancements in the ability to use glycoproteins in the study of human physiology, such as for disease diagnosis and treatment monitoring.

[0719] Thus, in some aspects, provided herein is a method for a method for processing a proteolytic digest sample for use in a LC-MS analysis, wherein the proteolytic digest sample comprises a plurality of proteolytically digested peptides comprising at least one proteolytically digested glycopeptide, the method comprising: (A) loading a HILIC load derived from the proteolytic digest sample to a solid phase extraction column comprising a HILIC medium according to one or more conditions to associate the at least one proteolytically digested glycopeptide with the HILIC medium, the one or more conditions comprising: (1) the loading of the HILIC load to the solid phase extraction column is initiated when the HILIC medium is in a dry state; (2) the HILIC load loaded to the solid phase extraction column has an amount of the plurality of proteolytically digested peptides characterized by one or both of: (a) a ratio of the weight of the plurality of proteolytically digested peptides over the weight of the HILIC medium in the dry state of at least about 0.05, including at least about 0.06; and/or (b) a ratio of the weight of the plurality of proteolytically digested peptides relative to the bed volume of the HILIC medium in the dry state of at least about 30 μg/μl, including at least about 40 μg/μl; or (3) the HILIC load loaded to the solid phase extraction column has a concentration of an organic solvent of at least about 70% (v/v); and (B) subjecting the HILIC medium to an elution solution to obtain a HILIC eluate comprising the at least one proteolytically digested glycopeptide.

### B5. Example Mass Spectrometry and Sample Preparation Workflow

[0720] For purposes of orientation and illustration of the description herein, provided in this section are example aspects of sample preparation and mass spectrometry workflows (FIGS. 1A-1C) for analyzing the composition of a peptide and/or glycopeptide using a mass spectrometer. Subsequent sections are provided with more details regarding certain inventive features related to methods for processing a proteolytic digest sample derived from a biological sample comprising a glycoprotein, methods of performing a LC-MS analysis of a proteolytic glycopeptide, and mass spectrometry workflows involving any combination of elements thereof.

[0721] FIG. 1A is a schematic of an example workflow 100 for a peptide structure analysis, including of glycopeptides. The workflow 100 may include various operations including, for example, sample collection 102, sample intake 104, sample preparation and mass spectrometry processing 106, and data analysis 108.

[0722] Sample collection 102 may include, for example, obtaining a biological sample 112 from an individual 114. A biological sample 112 may take the form of a specimen obtained via one or more sampling methods. A biological sample 112 may be representative of an individual 114 as a whole or of a specific tissue, cell type, or other category or sub-category of interest. In some embodiments, the biological sample 112 includes a whole blood sample 116 obtained via a blood draw. In some embodiments, the biological sample 112 includes set of aliquoted samples 118 that include, for example, a serum sample, a plasma sample, a blood cell (e.g., white blood cell (WBC), red blood cell (RBC) sample, another type of sample, or a combination thereof. In some embodiments, the biological sample 112 is a plasma sample from the individual 114. In some embodiments, the biological sample 112 is a serum sample from the individual 114. In some embodiments, the biological sample 112 may include nucleotides (e.g., ssDNA, dsDNA, RNA), organelles, amino acids, peptides, proteins, carbohydrates, glycoproteins, or any combination thereof.

[0723] Sample intake 104 may include one or more various operations such as, for example, aliquoting, labeling, registering, processing, storing, thawing, and/or other types of operations involved with preparing a sample for sample preparation and mass spectrometry processing.

[0724] Sample preparation and mass spectrometry processing 106 may include, for example, one or more operations to form set of peptide species 122, such as a proteolytically digested peptide and/or a proteolytically digested glycopeptide. In some embodiments, the sample preparation includes subjecting a biological sample to a proteolytic digestion. Mass spectrometry processing 124 may include, for example, liquid chromatography, introducing species from the sample, and/or derived therefrom, to a mass spectrometer, and data acquisition, such as using a multiple reaction monitoring (MRM) technique. MRM is a mass spectrometry method in which a precursor ion of a particular m/z value, including window thereof, (e.g., peptide analyte) is selected in the first quadrupole (Q1) and transmitted to the second quadrupole (Q2) for fragmentation. The resulting product ions are then transmitted to the third quadrupole (Q3), which detects only product ions with selected predefined m/z values. In some embodiments, the predefined m/z value, including window thereof, selected in the first quadrupole and a predefined m/z value, including window thereof, may be expressed as a MRM transition. Dynamic MRM (dMRM) is a variant of MRM. In dynamic MRM mode, MRM transition lists are scheduled throughout an LC/MS run based on the retention time window for each analyte. In this way, analytes are only monitored while they are eluting from the LC and therefore the MS scan time is not wasted by monitoring the analytes when they are not expected.

[0725] Data analysis 108 may include, for example, peptide structure analysis 126, e.g., determining the amino acid sequence of a peptide, determining a site of a post-translational modification, and/or determining a glycan composition and/or structure. In some embodiments, data analysis 108 also includes output generation 110. In some embodiments, output generation 110 may be considered a separate operation from data analysis 108. Output generation 110 may include, for example, generating final output 128 based on the results of peptide structure analysis 126. In some embodiments, the final output 128 may be used for one or more downstream purposes, such as research, diagnosis, and/or treatment, and may be sent to a remote system 130.

[0726] In certain aspects, the workflow 100 may optionally exclude one or more of the operations described herein and/or may optionally include one or more other steps or operations other than those described herein (e.g., in addition to and/or instead of those described herein).

[0727] FIG. 1B is a schematic of an example workflow 200 for certain sample preparation techniques 106, some of which may be optionally used in methods provided herein, including proteolytic digestion techniques to produce a proteolytic digest sample. In some embodiments, the workflow 200 comprises a denaturation step 202, such as to unfold and/or linearize a polypeptide to expose one or more cleavage sites. In some embodiments, the workflow 200 comprises a reduction step 202, such as to cleave disulfide bonds. In some embodiments, the workflow 200 comprises an alkylation technique 204, such as to modify cysteine residues to prevent reformation of a disulfide bond. In some embodiments, the workflow 200 comprises a proteolytic digestion technique 206, such as to produce proteolytically digested peptides, including proteolytically digested glycopeptides. Box 205 can represent the R group of an amino acid such as, for example, an R group of arginine or lysine that typically will direct a tryptic cleavage. In some embodiments, the workflow 200 may comprise a post-digestion procedure 207, such as any one or more of a desalting technique, addition of a standard, aliquoting, and/or preparation for a mass spectrometry analysis.

[0728] FIG. 1C is a schematic of an example workflow for certain mass spectrometry processing techniques 106, some of which may be optionally used in methods provided herein. In some embodiments, the workflow comprises a quantification technique 208 using a mass spectrometer, such as a liquid chromatography-mass spectrometry system. In some embodiments, the workflow comprises a quality control technique 210 configured to optimize data quality. In some embodiments, measures can be put in place allowing only errors within acceptable ranges outside of an expected value. In some embodiments, employing statistical models (e.g., using Westgard rules) can assist in quality control 210. For example, quality control 210 may include, for example, assessing the retention time and abundance of representative peptide species (e.g., glycosylated and/or aglycosylated peptide species) and spiked-in internal standards, in either every sample, or in each quality control sample (e.g., pooled serum digest). In some embodiments, the workflow comprises a peak integration and normalization technique 212 to process the data that has been generated and transform the data into a format for analysis. For example, peak integration and normalization 212 may include converting abundance data for various productions that were detected for a selected peptide species into a single quantification metric (e.g., a relative quantity, an adjusted quantity, a normalized quantity, a relative concentration, an adjusted concentration, or a normalized concentration) for that peptide structure. In some embodiments, peak integration and normalization 212 may be performed using one or more of the techniques described in U.S. Patent Publication No. 2020/0372973A1 and/or US Patent Publication No. 2020/0240996A1, the disclosures of which are incorporated by reference herein in their entireties.

### C5. Methods for Processing a Proteolytic Digest Sample

[0729] Provided herein, in certain aspects, are methods of processing a proteolytic digest sample using a solid phase extraction column comprising a comprising a hydrophilic interaction liquid chromatography (HILIC) medium. As taught herein, the described methodology may be used for the enrichment of glycopolypeptides (e.g., a proteolytically digested glycopeptide), from a sample such as a proteolytic digest sample. In some embodiments, the resulting composition obtained from the methodology provided herein, or a derivative thereof, is suitable for use in a liquid chromatography-mass spectrometry (LC-MS) analysis, such as for the analysis of glycopolypeptides. In some embodiments, the enriched glycopeptide is a proteolytically digested glycopeptide. In some embodiments, the enriched glycopeptide is an endogenous glycopeptide. In some embodiments, the glycopeptide obtained from the method provided herein is enriched by a factor of at least 30 when compared to the polypeptide content in a respective proteolytic digest sample.

[0730] Aspects of the disclosure provided herein may be described via the state of the HILIC medium (e.g., dry state) when initiating loading of a HILIC load to a solid phase extraction column comprising a HILIC medium, and/or one or more conditions of the HILIC load, such as an amount of a plurality of proteolytically digested peptides relative to an amount of the HILIC medium in the solid phase extraction column and/or a concentration of an organic solvent of the HILIC load. In some embodiments, methodology is exemplified for obtaining the HILIC load having the one or more conditions. For purposes of orientation of aspects of the methodology provided herein, FIG. 19 illustrates an example workflow from a proteolytic digest sample to a LC-MS system. In some embodiments, the proteolytic digest sample resulting from a proteolytic digestion is not suitable for direct introduction to the LC-MS system (or it is not desirable to do so), such as due to conditions needed to facilitate reactions relevant to the proteolytic digestion (e.g., high salt and/or buffer content). As provided herein, in some embodiments, components of the proteolytic digest sample, such as a plurality of proteolytically digested peptides comprising at least one proteolytically digested glycopeptide, are subjected to a solid phase extraction column comprising a HILIC medium to associate the at least one proteolytically digested glycopeptide with the HILIC medium. The composition comprising the plurality of proteolytically digested peptides directly loaded onto the solid phase extraction column is referred to herein as a HILIC load (represented by the solid arrow in FIG. 19). In some embodiments, the methodology provided herein comprises loading a HILIC load having a specified condition (such as polypeptide amount relative to the amount of HILIC medium and/or concentration of an organic solvent) to a solid phase extraction column comprising a HILIC medium. In some embodiments, the proteolytic digest sample is subjected to one or more processing steps to form the HILIC load (represented by the dashed arrow in FIG. 19). As shown in FIG. 19, a HILIC eluate comprising the at least one glycopeptide is obtained from the solid phase extraction column. In some embodiments, the HILIC eluate is subjected to one or more processing steps in preparation for subjecting the at least one glycopeptide to the LC-MS system (represented by the dashed arrow in FIG. 19).

[0731] As described in certain aspects the instant application, in some embodiments, provided is a method for processing a proteolytic digest sample for use in a LC-MS analysis, wherein the proteolytic digest sample comprises a plurality of proteolytically digested peptides comprising at least one proteolytically digested glycopeptide, the method comprising loading a HILIC load derived from the proteolytic digest sample to a solid phase extraction column comprising a HILIC medium to associate the at least one proteolytically digested glycopeptide with the HILIC medium, wherein the loading of the HILIC load to the solid phase extraction column is initiated when the HILIC medium is in a dry state. As described in certain aspects the instant application, in some embodiments, provided is a method for processing a proteolytic digest sample for use in a LC-MS analysis, wherein the proteolytic digest sample comprises a plurality of proteolytically digested peptides comprising at least one proteolytically digested glycopeptide, the method comprising loading a HILIC load derived from the proteolytic digest sample to a solid phase extraction column comprising a HILIC medium to associate the at least one proteolytically digested glycopeptide with the HILIC medium, wherein the HILIC load loaded to the solid phase extraction column has an amount of the plurality of proteolytically digested peptides characterized by one or both of: (a) a ratio of the weight of the plurality of proteolytically digested peptides over the weight of the HILIC medium in the dry state of at least about 0.06; and/or (b) a ratio of the weight of the plurality of proteolytically digested peptides relative to the bed volume of the HILIC medium in the dry state of at least about 40 μg/μl. As described in certain aspects the instant application, in some embodiments, provided is a method for processing a proteolytic digest sample for use in a LC-MS analysis, wherein the proteolytic digest sample comprises a plurality of proteolytically digested peptides comprising at least one proteolytically digested glycopeptide, the method comprising loading a HILIC load derived from the proteolytic digest sample to a solid phase extraction column comprising a HILIC medium to associate the at least one proteolytically digested glycopeptide with the HILIC medium, wherein the HILIC load loaded to the solid phase extraction column has a concentration of an organic solvent of at least about 70% (v/v). As described in certain aspects the instant application, in some embodiments, provided is a method for processing a proteolytic digest sample for use in a LC-MS analysis, the method comprising any one or more combinations of the steps described herein.

[0732] In the following sections, additional description of the various aspects of the methods for processing a proteolytic digest sample is provided. Such description in a modular fashion is not intended to limit the scope of the disclosure, and based on the teachings provided herein one of ordinary skill in the art will readily appreciate that certain modules can be integrated, at least in part. The section heading used herein are for organizational purposes only and are not to be construed as limiting the subject matter described.

### I. Dry State of HILIC Medium and HILIC Medium Characteristics

[0733] Provided herein, in some aspects, is a method for processing a proteolytic digest sample for use in a LC-MS analysis, the method comprising loading a HILIC load to a solid phase extraction column comprising a HILIC medium, wherein the loading of the HILIC load to the solid phase extraction column is initiated when the HILIC medium is in a dry state. One of ordinary skill in the art will readily appreciate that a HILIC medium will not remain in a dry state over the entire course of loading a HILIC load, i.e., the HILIC load will wet the HILIC medium over the course of applying the HILIC load to the HILIC medium. In some embodiments, the description of a dry state of a HILIC medium references the state of the HILIC medium immediately prior to a first portion of a HILIC load contacting the HILIC medium.

[0734] In some embodiments, the dry state of a HILIC medium is characterized by the HILIC medium comprising less than about 5% (v/v), such as less than about any of 4.5% (v/v), 4% (v/v), 3.5% (v/v), 3% (v/v), 2.5% (v/v), 2% (v/v), 1.5% (v/v), 1% (v/v), 0.5% (v/v), or 0.1% (v/v), of a liquid at the initiation of the loading of a HILIC load to a solid phase extraction column comprising the HILIC medium. In some embodiments, the HILIC medium is substantially dry, such as does contain a liquid in a measurable amount, such as above the level of liquid in surrounding air, e.g., as based on humidity. In some embodiments, the liquid comprises water.

[0735] In some embodiments, at the initiation of the loading of a HILIC load to a HILIC medium, the HILIC medium has not been subjected to a washing, equilibration, or wetting procedure. It is appreciated that in some embodiments, the HILIC medium may have been subjected to a liquid such as during manufacturing or packaging, and in certain aspects the present description regarding a dry state is focused on steps that occur after the HILIC medium is loaded into a cartridge to form the solid phase extraction column and dried (or a occur after a final drying step and prior to loading a HILIC load). For example, in some embodiments, the method comprises obtaining a solid phase extraction column comprising a HILIC medium, such as from a manufacturer, and loading a HILIC load to the solid phase extraction column without intervening steps of introducing a liquid to the solid phase extraction column, such as for purposes of a washing, equilibration, or wetting procedure. In some embodiments, at the initiation of the loading of a HILIC load to a HILIC medium, the HILIC medium is not in an equilibrated state. In some embodiments, at the initiation of the loading of a HILIC load to a HILIC medium, the HILIC medium is not in a wetted state. In some embodiments, at the initiation of the loading of a HILIC load to a HILIC medium, the HILIC medium is not in a swelled state. In some embodiments, at the initiation of the loading of a HILIC load to a HILIC medium, the HILIC medium is not in a hydrated state. In some embodiments, the HILIC medium may be subjected to a liquid, such as a washing liquid, and then subsequently dried, wherein at the initiation of the loading of a HILIC load to the HILIC medium, the HILIC load is in a dry state.

[0736] In some embodiments, at the initiation of the loading of a HILIC load on a HILIC medium, the HILIC medium is not equilibrated with an equilibration liquid. In some embodiments, at the initiation of the loading of a HILIC load on a HILIC medium, the HILIC medium is not washed with a wash liquid. In some embodiments, at the initiation of the loading of a HILIC load on a HILIC medium, the HILIC medium is not wetted with a wetting liquid. In some embodiments, during the loading of the HILIC load, the HILIC medium is hydrated with water and then binds to at least one glycopeptide, wherein the HILIC load includes both water and an organic miscible solvent.

[0737] In some embodiments, the method provided herein comprises drying a HILIC medium of a solid phase extraction column to obtain the HILIC medium in a dry state. In some embodiments, the drying comprises subjecting a solid phase extraction column, or a HILIC medium, to conditions such that a liquid in the solid phase extraction column of the HILIC medium can leave the solid phase extraction column. In some embodiments, the condition comprises a room temperature. In some embodiments, the condition comprises an elevate temperature. In some embodiments, the method comprises determining the liquid content of a HILIC medium to assess if it is in a dry state prior to loading a HILIC load to a solid phase extraction column comprising the HILIC medium. In some embodiments, drying a HILIC medium of a solid phase extraction column may comprises use of a force to push liquid through the solid phase extraction column, such as a centrifugal force, position pressure, and/or negative pressure.

[0738] In other aspects of the description provided herein, the HILIC medium need not be in a dry state at the initiation of the loading of the HILIC load to the solid phase extraction column. For example, in some embodiments, the solid phase extraction column is equilibrated, wetted, and/or washed prior to loading a HILIC load to the solid phase extraction column, such as according to manufacturer's instructions. In some embodiments, wherein a HILIC medium is not in a dry state, loading a HILIC load to a solid phase extraction column comprising the HILIC medium is characterized by one or more of: (1) the HILIC load loaded to the solid phase extraction column has an amount of the plurality of proteolytically digested peptides characterized by one or both of: (a) a ratio of the weight of the plurality of proteolytically digested peptides over the weight of the HILIC medium in the dry state of at least about 0.06; and/or (b) a ratio of the weight of the plurality of proteolytically digested peptides relative to the bed volume of the HILIC medium in the dry state of at least about 40 μg/μl; or (2) the HILIC load loaded to the solid phase extraction column has a concentration of an organic solvent of at least about 70% (v/v).

[0739] In some embodiments, the HILIC medium comprises a solid phase. In some embodiments, the HILIC medium comprises a solid phase comprising a polar functional moiety. In some embodiments, the solid phase comprises a silica material. In some embodiments, the polar functional moiety comprises one or more of an amino group, a cyano group, a carbamoyl group, an aminoalkyl group, alkylamide group, or a combination thereof. In some embodiments, the HILIC medium comprises an amide resin (e.g., Tosoh TSK-Gel Amide 80 Resin). In some embodiments, the HILIC medium comprises silica particles covalently bonded with carbamoyl groups. In some embodiments, the HILIC medium comprises 2 μm, 3 μm, 5 μm, or 10 μm silica particles of covalently bonded with carbamoyl groups, see, e.g., Y. Kawachi et al., J Chromatography A, 2011, which is incorporated herein by reference in its entirety. In some embodiments, the solid phase extraction column comprises about 0.5 mg to about 5 mg, including about any of 1 mg, 1.5 mg, 2 mg, 2.5 mg, 3 mg, 3.5 mg, 4 mg, or 4.5 mg, of a HILIC medium in a dry state. In some embodiments, the solid phase extraction column comprises a bed volume of a HILIC medium in a dry state of about 2.5 μl to about 7.5 μl, including about 5 μl. In some embodiments, the solid phase extraction column comprises about 2.5 mg to about 3.5 mg, including about 3 mg, of a HILIC medium in a dry state, a bed volume of the HILIC medium in a dry state of about 4 μl to about 6 μl, including about 5 μl, and wherein the HILIC medium comprises silica particles covalently bonded with carbamoyl groups. In some embodiments, the solid phase extraction column is a GlykoPrep Cleanup cartridge (e.g., Product code: GS96-CU; WS0263).

[0740] HILIC is used primarily for the separation of polar and hydrophilic compounds such as, for example, glycopeptides. HILIC stationary phases are polar and tend to bind hydrophilic compounds like glycopeptides. Typical mobile phases are aqueous buffers with organic modifiers such as acetonitrile. It is believed that the aqueous content of the liquid passing through the phase creates a water rich layer on the surface of the stationary phase. This allows for partitioning of solutes between the more organic mobile phase and the aqueous layer. Liquid with a higher proportion of organic solvent passing through the HILIC phase tends to cause polar compounds to partition into the aqueous layer on the HILIC medium. In contrast, liquid with a lower proportion of organic solvent passing through the HILIC phase tends to cause polar compounds to partition out of the aqueous layer and into the passing liquid.

### II. HILIC Loads and Methods of Making

[0741] Provided herein, in some aspects, is a method for processing a proteolytic digest sample for use in a LC-MS analysis, the method comprising loading a HILIC load to a solid phase extraction column comprising a HILIC medium, wherein the HILIC load comprises: (a) an amount of the plurality of proteolytically digested peptides characterized by one or both of: (i) a ratio of the weight of the plurality of proteolytically digested peptides over the weight of the HILIC medium in the dry state of at least about 0.05, including at least about 0.06; and/or (ii) a ratio of the weight of the plurality of proteolytically digested peptides relative to the bed volume of the HILIC medium in the dry state of at least about 30 μg/μl, including at least about 40 μg/μl; and/or (b) a concentration of an organic solvent of at least about 70% (v/v). Also provided herein are methodologies for making the HILIC load having: (a) an amount of the plurality of proteolytically digested peptides characterized by one or both of: (i) a ratio of the weight of the plurality of proteolytically digested peptides over the weight of the HILIC medium in the dry state of at least about 0.05, including at least about 0.06; and/or (ii) a ratio of the weight of the plurality of proteolytically digested peptides relative to the bed volume of the HILIC medium in the dry state of at least about 30 μg/μl, including at least about 40 μg/μl; and/or (b) a concentration of an organic solvent of at least about 70% (v/v). For example, in some embodiments, the methods provided herein comprise: (a) obtaining a proteolytic digest sample; (b) removing a liquid content of the proteolytic digest sample; and (c) reconstituting the proteolytic digest sample to produce the HILIC load such that the HILIC load comprises: (A) an amount of the plurality of proteolytically digested peptides characterized by one or both of: (i) a ratio of the weight of the plurality of proteolytically digested peptides over the weight of the HILIC medium in the dry state of at least about 0.05, including at least about 0.06; and/or (ii) a ratio of the weight of the plurality of proteolytically digested peptides relative to the bed volume of the HILIC medium in the dry state of at least about 30 μg/μl, including at least about 40 μg/μl; and/or (b) a concentration of an organic solvent of at least about 70% (v/v).

[0742] In some embodiments, the HILIC load loaded to a solid phase extraction column has an amount of the plurality of proteolytically digested peptides characterized by a ratio of the weight of the plurality of proteolytically digested peptides over the weight of the HILIC medium in the dry state of about 0.05 to about 0.5, such as any of about 0.05 to about 0.35, about 0.05 to about 0.15, about 0.05 to about 0.25, or about 0.15 to about 0.25. In some embodiments, the HILIC load loaded to a solid phase extraction column has an amount of the plurality of proteolytically digested peptides characterized by a ratio of the weight of the plurality of proteolytically digested peptides over the weight of the HILIC medium in the dry state of at least about 0.05, such as at least about any of 0.06, 0.07, 0.08, 0.09, 0.1, 0.11, 0.12, 0.13, 0.14, 0.15, 0.16, 0.17, 0.18, 0.19, 0.20, 0.21, 0.22, 0.23, 0.24, 0.25, 0.26, 0.27, 0.28, 0.29, 0.30, 0.31, 0.32, 0.33, 0.34, or 0.35. In some embodiments, the HILIC load loaded to a solid phase extraction column has an amount of the plurality of proteolytically digested peptides characterized by a ratio of the weight of the plurality of proteolytically digested peptides over the weight of the HILIC medium in the dry state is about any of 0.05, 0.06, 0.07, 0.08, 0.09, 0.1, 0.11, 0.12, 0.13, 0.14, 0.15, 0.16, 0.17, 0.18, 0.19, 0.20, 0.21, 0.22, 0.23, 0.24, 0.25, 0.26, 0.27, 0.28, 0.29, 0.30, 0.31, 0.32, 0.33, 0.34, or 0.35. In some embodiments, the HILIC load loaded to a solid phase extraction column has an amount of the plurality of proteolytically digested peptides characterized by a ratio of the weight of the plurality of proteolytically digested peptides over the weight of the HILIC medium in the dry state of at least about 0.1, including about 0.1. In some embodiments, the HILIC load loaded to a solid phase extraction column has an amount of the plurality of proteolytically digested peptides characterized by a ratio of the weight of the plurality of proteolytically digested peptides over the weight of the HILIC medium in the dry state of at least about 0.2, including about 0.2. In any of the embodiments herein, the HILIC medium in the dry state has a weight of about 3 mg. In any of the embodiments herein, the HILIC medium in the dry state has a bed volume of about 5 μL. In some embodiments, the HILIC medium comprises silica particles covalently bonded with carbamoyl groups. In some embodiments, the solid phase extraction column comprises about 2.5 mg to about 3.5 mg, including about 3 mg, of a HILIC medium in a dry state, a bed volume of the HILIC medium in a dry state of about 4 μl to about 6 μl, including about 5 μl, and wherein the HILIC medium comprises silica particles covalently bonded with carbamoyl groups. In some embodiments, the solid phase extraction column is a GlykoPrep Cleanup cartridge (e.g., Product code: GS96-CU; WS0263).

[0743] In some embodiments, the HILIC load loaded to the solid phase extraction column has an amount of the plurality of proteolytically digested peptides characterized by a ratio of the weight of the plurality of proteolytically digested peptides relative to the bed volume of the HILIC medium in the dry state of about 30 μg/μl to about 200 μg/μl, such any of about 50 μg/μl to about 130 μg/μl, about 55 μg/μl to about 65 μg/μl, about 110 μg/μl to about 130 μg/μl, or about 115 μg/μl to about 125 μg/μl. In some embodiments, the HILIC load loaded to the solid phase extraction column has an amount of the plurality of proteolytically digested peptides characterized by a ratio of the weight of the plurality of proteolytically digested peptides relative to the bed volume of the HILIC medium in the dry state of at least about 30 μg/μl, such as at least about any of 35 μg/μl, 40 μg/μl, 45 μg/μl, 50 μg/μl, 55 μg/μl, 60 μg/μl, 65 μg/μl, 70 μg/μl, 75 μg/μl, 80 μg/μl, 85 μg/μl, 90 μg/μl, 95 μg/μl, 100 μg/μl, 105 μg/μl, 110 μg/μl, 115 μg/μl, 120 μg/μl, 125 μg/μl, 130 μg/μl, 135 μg/μl, 140 μg/μl, 145 μg/μl, 150 μg/μl, 155 μg/μl, 160 μg/μl, 165 μg/μl, 170 μg/μl, 175 μg/μl, 180 μg/μl, 185 μg/μl, 190 μg/μl, 195 μg/μl, or 200 μg/μl. In some embodiments, the HILIC load loaded to the solid phase extraction column has an amount of the plurality of proteolytically digested peptides characterized by a ratio of the weight of the plurality of proteolytically digested peptides relative to the bed volume of the HILIC medium in the dry state of about any of 30 μg/μl, 35 μg/μl, 40 μg/μl, 45 μg/μl, 50 μg/μl, 55 μg/μl, 60 μg/μl, 65 μg/μl, 70 μg/μl, 75 μg/μl, 80 μg/μl, 85 μg/μl, 90 μg/μl, 95 μg/μl, 100 μg/μl, 105 μg/μl, 110 μg/μl, 115 μg/μl, 120 μg/μl, 125 μg/μl, 130 μg/μl, 135 μg/μl, 140 μg/μl, 145 μg/μl, 150 μg/μl, 155 μg/μl, 160 μg/μl, 165 μg/μl, 170 μg/μl, 175 μg/μl, 180 μg/μl, 185 μg/μl, 190 μg/μl, 195 μg/μl, or 200 μg/μl. In some embodiments, the HILIC load loaded to the solid phase extraction column has an amount of the plurality of proteolytically digested peptides characterized by a ratio of the weight of the plurality of proteolytically digested peptides relative to the bed volume of the HILIC medium in the dry state of at least about 60 μg/μl, including about 60 μg/μl. In some embodiments, the HILIC load loaded to the solid phase extraction column has an amount of the plurality of proteolytically digested peptides characterized by a ratio of the weight of the plurality of proteolytically digested peptides relative to the bed volume of the HILIC medium in the dry state of at least about 120 μg/μl, including about 120 μg/μl. In any of the embodiments herein, the HILIC medium in the dry state has a weight of about 3 mg. In any of the embodiments herein, the HILIC medium in the dry state has a bed volume of about 5 μL. In some embodiments, the HILIC medium comprises silica particles covalently bonded with carbamoyl groups. In some embodiments, the solid phase extraction column comprises about 2.5 mg to about 3.5 mg, including about 3 mg, of a HILIC medium in a dry state, a bed volume of the HILIC medium in a dry state of about 4 μl to about 6 μl, including about 5 μl, and wherein the HILIC medium comprises silica particles covalently bonded with carbamoyl groups. In some embodiments, the solid phase extraction column is a GlykoPrep Cleanup cartridge (e.g., Product code: GS96-CU; WS0263).

[0744] In some embodiments, the HILIC load loaded to a solid phase extraction column has an amount of the plurality of proteolytically digested peptides characterized by a ratio of the weight of the plurality of proteolytically digested peptides over the weight of the HILIC medium in the dry state of about 0.05 to about 0.5, such as any of about 0.05 to about 0.35, about 0.05 to about 0.15, about 0.05 to about 0.25, or about 0.15 to about 0.25, and characterized by a ratio of the weight of the plurality of proteolytically digested peptides relative to the bed volume of the HILIC medium in the dry state of about 30 μg/μl to about 200 μg/μl, such any of about 50 μg/μl to about 130 μg/μl, about 55 μg/μl to about 65 μg/μl, about 110 μg/μl to about 130 μg/μl, or about 115 μg/μl to about 125 μg/μl. In some embodiments, the HILIC load loaded to a solid phase extraction column has an amount of the plurality of proteolytically digested peptides characterized by a ratio of the weight of the plurality of proteolytically digested peptides over the weight of the HILIC medium in the dry state of at least about 0.05, such as at least about any of 0.06, 0.07, 0.08, 0.09, 0.1, 0.11, 0.12, 0.13, 0.14, 0.15, 0.16, 0.17, 0.18, 0.19, 0.20, 0.21, 0.22, 0.23, 0.24, 0.25, 0.26, 0.27, 0.28, 0.29, 0.30, 0.31, 0.32, 0.33, 0.34, or 0.35, and characterized by a ratio of the weight of the plurality of proteolytically digested peptides relative to the bed volume of the HILIC medium in the dry state of at least about 30 μg/μl, such as at least about any of 35 μg/μl, 40 μg/μl, 45 μg/μl, 50 μg/μl, 55 μg/μl, 60 μg/μl, 65 μg/μl, 70 μg/μl, 75 μg/μl, 80 μg/μl, 85 μg/μl, 90 μg/μl, 95 μg/μl, 100 μg/μl, 105 μg/μl, 110 μg/μl, 115 μg/μl, 120 μg/μl, 125 μg/μl, 130 μg/μl, 135 μg/μl, 140 μg/μl, 145 μg/μl, 150 μg/μl, 155 μg/μl, 160 μg/μl, 165 μg/μl, 170 μg/μl, 175 μg/μl, 180 μg/μl, 185 μg/μl, 190 μg/μl, 195 μg/μl, or 200 μg/μl. In some embodiments, the HILIC load loaded to a solid phase extraction column has an amount of the plurality of proteolytically digested peptides characterized by a ratio of the weight of the plurality of proteolytically digested peptides over the weight of the HILIC medium in the dry state is about any of 0.05, 0.06, 0.07, 0.08, 0.09, 0.1, 0.11, 0.12, 0.13, 0.14, 0.15, 0.16, 0.17, 0.18, 0.19, 0.20, 0.21, 0.22, 0.23, 0.24, 0.25, 0.26, 0.27, 0.28, 0.29, 0.30, 0.31, 0.32, 0.33, 0.34, or 0.35, and characterized by a ratio of the weight of the plurality of proteolytically digested peptides relative to the bed volume of the HILIC medium in the dry state of about any of 30 μg/μl, 35 μg/μl, 40 μg/μl, 45 μg/μl, 50 μg/μl, 55 μg/μl, 60 μg/μl, 65 μg/μl, 70 μg/μl, 75 μg/μl, 80 μg/μl, 85 μg/μl, 90 μg/μl, 95 μg/μl, 100 μg/μl, 105 μg/μl, 110 μg/μl, 115 μg/μl, 120 μg/μl, 125 μg/μl, 130 μg/μl, 135 μg/μl, 140 μg/μl, 145 μg/μl, 150 μg/μl, 155 μg/μl, 160 μg/μl, 165 μg/μl, 170 μg/μl, 175 μg/μl, 180 μg/μl, 185 μg/μl, 190 μg/μl, 195 μg/μl, or 200 μg/μl. In some embodiments, the HILIC load loaded to a solid phase extraction column has an amount of the plurality of proteolytically digested peptides characterized by a ratio of the weight of the plurality of proteolytically digested peptides over the weight of the HILIC medium in the dry state of at least about 0.1, including about 0.1, and characterized by a ratio of the weight of the plurality of proteolytically digested peptides relative to the bed volume of the HILIC medium in the dry state of at least about 60 μg/μl, including about 60 μg/μl. In some embodiments, the HILIC load loaded to a solid phase extraction column has an amount of the plurality of proteolytically digested peptides characterized by a ratio of the weight of the plurality of proteolytically digested peptides over the weight of the HILIC medium in the dry state of at least about 0.2, including about 0.2, and characterized by a ratio of the weight of the plurality of proteolytically digested peptides relative to the bed volume of the HILIC medium in the dry state of at least about 120 μg/μl, including about 120 μg/μl. In any of the embodiments herein, the HILIC medium in the dry state has a weight of about 3 mg. In any of the embodiments herein, the HILIC medium in the dry state has a bed volume of about 5 μL. In some embodiments, the HILIC medium comprises silica particles covalently bonded with carbamoyl groups. In some embodiments, the solid phase extraction column comprises about 2.5 mg to about 3.5 mg, including about 3 mg, of a HILIC medium in a dry state, a bed volume of the HILIC medium in a dry state of about 4 μl to about 6 μl, including about 5 μl, and wherein the HILIC medium comprises silica particles covalently bonded with carbamoyl groups. In some embodiments, the solid phase extraction column is a GlykoPrep Cleanup cartridge (e.g., Product code: GS96-CU; WS0263).

[0745] In some embodiments, the HILIC load has an amount of a plurality of proteolytically digested peptides of about 150 μg to about 1,000 μg, such as any of about 200 μg to about 800 μg, about 200 μg to about 600 μg, about 250 μg to about 650 μg, or about 300 μg to about 600 μg. In some embodiments, the HILIC load has an amount of a plurality of proteolytically digested peptides of at least about 150 μg, such as at least about any of 150 μg, 200 μg, 250 μg, 300 μg, 350 μg, 400 μg, 450 μg, 500 μg, 550 μg, 600 μg, 650 μg, 700 μg, 750 μg, 800 μg, 850 μg, 900 μg, 950 μg, or 1,000 μg. In some embodiments, the HILIC load has an amount of a plurality of proteolytically digested peptides of about 200 μg or more, such as about any of 250 μg or more, 300 μg or more, 350 μg or more, 400 μg or more, 450 μg or more, 500 μg or more, 550 μg or more, 600 μg or more, 650 μg or more, 700 μg or more, 750 μg or more, 800 μg or more, 850 μg or more, 900 μg or more, 950 μg or more, or 1,000 μg or more.

[0746] In some embodiments, the HILIC load has an amount of a plurality of proteolytically digested peptides of about 150 μg to about 1,000 μg, such as any of about 200 μg to about 800 μg, about 200 μg to about 600 μg, about 250 μg to about 650 μg, or about 300 μg to about 600 μg, wherein the solid phase extraction column comprises about 2.5 mg to about 3.5 mg, including about 3 mg, of a HILIC medium in a dry state, a bed volume of the HILIC medium in a dry state of about 4 μl to about 6 μl, including about 5 μl, and wherein the HILIC medium comprises silica particles covalently bonded with carbamoyl groups. In some embodiments, the HILIC load has an amount of a plurality of proteolytically digested peptides of at least about 150 μg, such as at least about any of 150 μg, 200 μg, 250 μg, 300 μg, 350 μg, 400 μg, 450 μg, 500 μg, 550 μg, 600 μg, 650 μg, 700 μg, 750 μg, 800 μg, 850 μg, 900 μg, 950 μg, or 1,000 μg, wherein the solid phase extraction column comprises about 2.5 mg to about 3.5 mg, including about 3 mg, of a HILIC medium in a dry state, a bed volume of the HILIC medium in a dry state of about 4 μl to about 6 μl, including about 5 μl, and wherein the HILIC medium comprises silica particles covalently bonded with carbamoyl groups. In some embodiments, the HILIC load has an amount of a plurality of proteolytically digested peptides of about 200 μg or more, such as about any of 250 μg or more, 300 μg or more, 350 μg or more, 400 μg or more, 450 μg or more, 500 μg or more, 550 μg or more, 600 μg or more, 650 μg or more, 700 μg or more, 750 μg or more, 800 μg or more, 850 μg or more, 900 μg or more, 950 μg or more, or 1,000 μg or more, wherein the solid phase extraction column comprises about 2.5 mg to about 3.5 mg, including about 3 mg, of a HILIC medium in a dry state, a bed volume of the HILIC medium in a dry state of about 4 μl to about 6 μl, including about 5 μl, and wherein the HILIC medium comprises silica particles covalently bonded with carbamoyl groups. In some embodiments, the solid phase extraction column is a GlykoPrep Cleanup cartridge (e.g., Product code: GS96-CU; WS0263).

[0747] Polypeptide amounts described herein may be absolute or estimated amounts. In some embodiments, the amount of polypeptide content in any sample, or a derivative thereof, is a measured directly from said sample, or the derivative thereof, e.g., using a BCA quantification assay or a UV-VIS measurement at 280 nm. In some embodiments, the amount of polypeptide content in a sample, or a derivative thereof, is estimated based on a known, including reference standard, value for polypeptide content in the sample based on the origin of the sample, e.g., such as based on a known standard polypeptide concentration in human plasma or serum.

[0748] In some embodiments, provided is a method for processing a proteolytic digest sample for use in a LC-MS analysis, the method comprising loading a HILIC load to a solid phase extraction column comprising a HILIC medium, wherein the HILIC load comprises a concentration of an organic solvent of at least about 70% (v/v), such as at least about any of 71% (v/v), 72% (v/v), 73% (v/v), 74% (v/v), 75% (v/v), 76% (v/v), 77% (v/v), 78% (v/v), 79% (v/v), 80% (v/v), 81% (v/v), 82% (v/v), 83% (v/v), 84% (v/v), 85% (v/v), 86% (v/v), 87% (v/v), 88% (v/v), 89% (v/v), 90% (v/v), 91% (v/v), 92% (v/v), 93% (v/v), 94% (v/v), 95% (v/v), 96% (v/v), 97% (v/v), 98% (v/v), or 99% (v/v). In some embodiments, the HILIC load comprises a concentration of an organic solvent of about any of 70% (v/v), 71% (v/v), 72% (v/v), 73% (v/v), 74% (v/v), 75% (v/v), 76% (v/v), 77% (v/v), 78% (v/v), 79% (v/v), 80% (v/v), 81% (v/v), 82% (v/v), 83% (v/v), 84% (v/v), 85% (v/v), 86% (v/v), 87% (v/v), 88% (v/v), 89% (v/v), 90% (v/v), 91% (v/v), 92% (v/v), 93% (v/v), 94% (v/v), 95% (v/v), 96% (v/v), 97% (v/v), 98% (v/v), 99% (v/v), or 100% (v/v).

[0749] In some embodiments, the organic solvent comprises an aprotic solvent miscible in water. In some embodiments, the organic solvent is selected from the group consisting of acetonitrile, ethanol, methanol, tetrahydrofuran, and dioxane, or a combination thereof. In some embodiments, the organic solvent comprises acetonitrile (ACN). In some embodiments, the organic solvent is ACN.

[0750] In some embodiments, provided is a method for processing a proteolytic digest sample for use in a LC-MS analysis, the method comprising loading a HILIC load to a solid phase extraction column comprising a HILIC medium, wherein the HILIC load comprises a concentration of ACN of at least about 70% (v/v), such as at least about any of 71% (v/v), 72% (v/v), 73% (v/v), 74% (v/v), 75% (v/v), 76% (v/v), 77% (v/v), 78% (v/v), 79% (v/v), 80% (v/v), 81% (v/v), 82% (v/v), 83% (v/v), 84% (v/v), 85% (v/v), 86% (v/v), 87% (v/v), 88% (v/v), 89% (v/v), 90% (v/v), 91% (v/v), 92% (v/v), 93% (v/v), 94% (v/v), 95% (v/v), 96% (v/v), 97% (v/v), 98% (v/v), or 99% (v/v). In some embodiments, the HILIC load comprises a concentration of ACN of about any of 70% (v/v), 71% (v/v), 72% (v/v), 73% (v/v), 74% (v/v), 75% (v/v), 76% (v/v), 77% (v/v), 78% (v/v), 79% (v/v), 80% (v/v), 81% (v/v), 82% (v/v), 83% (v/v), 84% (v/v), 85% (v/v), 86% (v/v), 87% (v/v), 88% (v/v), 89% (v/v), 90% (v/v), 91% (v/v), 92% (v/v), 93% (v/v), 94% (v/v), 95% (v/v), 96% (v/v), 97% (v/v), 98% (v/v), 99% (v/v), or 100% (v/v). In some embodiments, the HILIC load comprises a concentration of ACN of about 80% (v/v).

[0751] In some aspects of the methods provided herein, the method comprises one or more steps for obtaining, such as making, a HILIC load. In some embodiments, the HILIC load comprises: (a) an amount of the plurality of proteolytically digested peptides characterized by one or both of: (i) a ratio of the weight of the plurality of proteolytically digested peptides over the weight of the HILIC medium in the dry state of at least about 0.05; and/or (ii) a ratio of the weight of the plurality of proteolytically digested peptides relative to the bed volume of the HILIC medium in the dry state of at least about 30 μg/μl, including such HILIC load in a set volume, e.g., about 220 μl or less; and/or (b) a concentration of an organic solvent of at least about 70% (v/v). In some embodiments, the proteolytic digest sample, such as resulting from a tryptic digestion, is of a different constitution than a HILIC load used in the methods described herein, such as HILIC load comprising (a) an amount of the plurality of proteolytically digested peptides characterized by one or both of: (i) a ratio of the weight of the plurality of proteolytically digested peptides over the weight of the HILIC medium in the dry state of at least about 0.05; and/or (ii) a ratio of the weight of the plurality of proteolytically digested peptides relative to the bed volume of the HILIC medium in the dry state of at least about 30 μg/μl; and/or (b) a concentration of an organic solvent of at least about 70% (v/v). In such embodiments, encompassed herein are method steps for processing a proteolytic digest sample to form a HILIC load. In some embodiments, the methods provided herein comprise: (a) obtaining a proteolytic digest sample; (b) removing a liquid content of the proteolytic digest sample; and (c) reconstituting the proteolytic digest sample to produce the HILIC load such that the HILIC load comprises: (A) an amount of the plurality of proteolytically digested peptides characterized by one or both of: (i) a ratio of the weight of the plurality of proteolytically digested peptides over the weight of the HILIC medium in the dry state of at least about 0.05; and/or (ii) a ratio of the weight of the plurality of proteolytically digested peptides relative to the bed volume of the HILIC medium in the dry state of at least about 30 μg/μl, including such HILIC load in a set volume, e.g., about 220 μl or less; and/or (B) a concentration of an organic solvent of at least about 70% (v/v).

[0752] In some embodiments, obtaining the HILIC load comprises reducing (such as removing) a liquid content from a proteolytic digest sample, such as resulting from a tryptic digestion, without substantial loss of a plurality of proteolytically digested peptides in the proteolytic digest sample. In some embodiments, the HILIC load comprises at least about 70%, 80%, or 90%, such as at least about any of 91%, 92%, 93%, 94%, 95%, 96%, 97%, 99%, or 100%, of a plurality of proteolytically digested peptides as compared to a proteolytic digest sample from which the HILIC load is obtained. In some embodiments, the reducing (such as removing) the liquid content from the proteolytic digested sample comprises performing a peptide concentrating technique with the proteolytically digested sample to obtain a precursor of the HILIC load such that (a) the precursor can be reconstituted with a reconstitution liquid comprising the organic solvent to obtain the HILIC load having a volume of 220 μL or less and a concentration of the organic solvent of at least about 70% (v/v); and (b) the resulting HILIC load comprises an amount of the plurality of proteolytically digested peptides of at least about 200 g.

[0753] In some embodiments, the method comprises reducing a liquid content from the proteolytic digest sample to form a dried proteolytic digest sample; and reconstituting the dried proteolytic digest sample with a reconstitution liquid comprising the organic solvent to produce the HILIC load such that (a) the HILIC load has a volume of about 220 μL or less and a concentration of the organic solvent of at least about 70% (v/v); and (b) the HILIC load has an amount of the plurality of proteolytic peptides of at least about 200 μg.

[0754] In some embodiments, the reconstituting the dried proteolytic digest sample comprises: mixing the dried proteolytic digest sample with an amount of water to form a water mixture: sonicating the water mixture with a sonicator; mixing the water mixture with an amount of trifluoracetic acid (TFA) and acetonitrile (ACN), wherein the amount of TFA and ACN are such that the final concentration of TFA is about 1% (v/v) and the final concentration of ACN is about 80% (v/v); and sonicating the water mixture having the amount of TFA and ACN with a sonicator to produce the HILIC load. In some embodiments, the sonicating the water mixture with the sonicator comprises a water-based dissolution cycle, wherein the water-based dissolution cycle is repeated about 2 times to about 5 times, and wherein for each of the water-based dissolution cycles, the sonicating the water mixture is performed for about 5 minutes and a water reservoir of the sonicator is configured with ice to cool the water reservoir. In some embodiments, the sonicating the water mixture having the amount of TFA and ACN with the sonicator comprises an organic-based dissolution cycle, wherein the organic-based dissolution cycle is repeated about 2 times to about 3 times, and wherein for each of the organic-based dissolution cycles, the sonicating is performed for about 4 minutes and a water reservoir of the sonicator is configured with ice to cool the water reservoir.

[0755] In some embodiments, wherein the reducing (such as removing) the liquid content from the proteolytic digest sample comprises removing all or substantially all of the liquid content therefrom. In some embodiments, the peptide concentrating technique comprises a vacuum evaporation technique or a lyophilization technique. In some embodiments, the peptide concentrating technique comprises a SpeedVac.

[0756] In some embodiments, the proteolytic digest sample having reduced liquid content, such as a dried proteolytic digest sample, is reconstituted with one or more liquids. In some embodiments, the one or more liquids comprise one or more of water, TFA, ACN, or any combination thereof. In some embodiments, the dried proteolytic digest sample is reconstituted in stages, such as a first stage with water and a second stage with TFA and ACN, such that a HILIC load is obtained as described herein. In some embodiments, the volume of the HILIC load is about 10 μL to about 1 mL, such as about 100 to about 500 μL, about 50 μL to about 220 μL, or about 100 to about 220 μL. In some embodiments, the volume of the HILIC load is about 220 μL or less, such as about 210 μL or less, 200 μL or less, 190 μL or less, 180 μL or less, 170 μL or less, 160 μL or less, 150 μL or less, 140 μL or less, 130 μL or less, 120 μL or less, 110 μL or less, 100 μL or less, 90 μL or less, 80 μL or less, 70 μL or less, 60 μL or less, or 50 μL or less.

### III. Additional Aspects of the Methods for Processing a Proteolytic Digest Sample

[0757] In certain aspects, the method provided herein comprises one or more additional steps involved with processing a proteolytic digest sample taught herein.

[0758] In some embodiments, the method comprises performing a washing step after loading a HILIC load to a solid phase extraction column comprising a HILIC medium and prior to subjecting the HILIC medium to n elution liquid, wherein the washing step comprises subjecting the HILIC medium to a wash liquid. In some embodiments, the wash liquid comprises an organic solvent at a concentration of at least about 90% (v/v), such as at least about 91% (v/v), 92% (v/v), 93% (v/v), 94% (v/v), 95% (v/v), 96% (v/v), 97% (v/v), 98% (v/v), or 99% (v/v). In some embodiments, the organic solvent is ACN. In some embodiments, the wash liquid further comprises TFA at a concentration of about 0.5% (v/v) to about 1% (v/v), including 1% (v/v).

[0759] In some embodiments, the elution liquid comprises a high percentage of an aqueous liquid, such as at least about 90% (v/v), such as at least about 91% (v/v), 92% (v/v), 93% (v/v), 94% (v/v), 95% (v/v), 96% (v/v), 97% (v/v), 98% (v/v), or 99% (v/v), of water. In some embodiments, the elution liquid further comprises about 0.05% (v/v) to about 0.5% (v/v) of TFA, such as about 0.1% TFA.

[0760] In some embodiments, the method comprises collecting the HILIC eluate, or a fraction thereof, from the solid phase extraction column, wherein the HILIC eluate comprises the at least one proteolytically digested glycopeptide. In some embodiments, after the collecting the HILIC eluate from the solid phase extraction column, the method further comprises reducing a liquid content of the collected HILIC eluate. In some embodiments, the method comprises subjecting the HILIC eluate to a peptide concentrating technique to produce a dried HILIC eluate, such as a peptide concentrating technique (e.g., SpeedVac).

[0761] In some embodiments, the method comprises reconstituting the dried HILIC eluate to form a sample suitable for introduction to the LC-MS system. In some embodiments, the dried HILIC eluate is reconstituted using 0.1% formic acid (FA) or TFA in water (e.g., in 30 μL of 0.1% FA in water).

[0762] As described in more detail herein, in some embodiments, the method comprises injecting the sample suitable for introduction to the LC-MS system into the LC-MS system. In some embodiments, the method comprises performing a mass spectrometry technique to obtain mass spectrometry data. In some embodiments, the method comprises identifying a peptide sequence of a glycopeptide from the mass spectrometry data. In some embodiments, the method comprises identifying a glycan attachment site of the glycopeptide from the mass spectrometry data. In some embodiments, the method comprises identifying a glycan structure of the glycopeptide from the mass spectrometry data. In some embodiments, the at least one glycopeptide comprises a glycan structure comprising one or more sialic acid moieties. In some embodiments, the proteolytic digest sample is obtained from a method for proteolytically digesting a biological sample comprising a glycoprotein.

[0763] In certain aspects, the method provided herein enable the enrichment of glycopeptide species derived from a biological sample, such as via a proteolytic digest sample. In some embodiments, a glycopeptide concentration for a glycopeptide derived from the proteolytic digest sample is enriched by a factor of 30 or greater, such as any of 40 or greater, 50 or greater, 60 or greater, 70 or greater, 80 or greater, 90 or greater, 100 or greater, 110 or greater, 120 or greater, 130 or greater, 140 or greater, 150 or greater, 160 or greater, 170 or greater, 180 or greater, 190 or greater, or 200 or greater, with respect to a peptide concentration, wherein the peptide concentration represents an amount of a peptide that is associated with the same protein as the glycopeptide. In some embodiments, the method comprises: measuring a first plurality of peak area values for a first panel of glycopeptides; measuring a second plurality of peak area values for a second panel of unglycosylated peptides wherein each of the unglycosylated peptides of the second panel corresponds to each of the glycopeptides of the first panel by being attached to a same protein molecule before a proteolytic digestion; calculating a plurality of ratios by dividing each of the first plurality of peak area values with each of the second plurality of peak area values, respectively; and determining a median ratio from the plurality of ratios, wherein the median ratio is greater than 30.

[0764] In some embodiments, wherein the method for processing a proteolytic digest sample is performed in replicate (e.g., two or more aliquots of a proteolytic digest sample are processed using the same method for processing), the resulting coefficient of variation (CV) of a peak feature, such as peak area of the measured polypeptide, e.g., glycopolypeptide, is about 15% or less, such as about any of 14% or less, 13% or less, 12% or less, 11% or less, 10% or less, 9% or less, 8% or less, 7% or less, 6% or less, 5% or less, 4% or less, 3% or less, 2% or less, or 1% or less.

### D5. Methods for Proteolytically Digesting a Biological Sample Comprising a Glycoprotein

[0765] In certain aspects, provided herein are methods of proteolytically digesting a biological sample comprising a glycoprotein, the methods comprising subjecting the biological sample to a thermal denaturation technique. Proteases are enzymes that cleave polypeptides at, generally, specific cleavage motifs. For example, trypsin is a serine protease that generally cleaves polypeptides at the carboxyl side (C-terminal side) of lysine and arginine residues. A glycan of a glycopeptide may present a steric hindrance to a protease, thereby inhibiting complete protease digestion of a biological sample comprising a glycoprotein. Without being bound to this theory, it is believed that the methods taught herein improve polypeptide unfolding, such as linearization, and provide protease access to cleavage sites thereby providing methods for more complete proteolytic digestion of glycoproteins.

[0766] In some aspects, provided is a method comprising subjecting a biological sample to a thermal denaturation technique to produce a denatured sample.

[0767] In other aspects, provided is a method comprising subjecting a biological sample to a thermal denaturation technique to produce a denatured sample followed by a proteolytic digestion technique to produce a proteolytic digest sample comprising a proteolytic glycopeptide. In some embodiments, the method comprises quenching one or more proteases used in a proteolytic digestion technique prior to a downstream technique, such as LC-MS.

[0768] In other aspects, provided herein is a method comprising: subjecting a biological sample to a thermal denaturation technique to produce a denatured sample; subjecting the denatured sample to a reduction technique to produce a reduced sample; subjecting the reduced sample to an alkylation technique to produce an alkylated sample; and subjecting the alkylated sample to a proteolytic digestion technique to produce a proteolytic digest sample comprising the proteolytic glycopeptide. In some embodiments, the method comprises quenching an alkylating agent used in the alkylation technique prior to subjecting an alkylated sample to a proteolytic digestion technique. In some embodiments, the method comprises quenching one or more proteases used in a proteolytic digestion technique prior to a downstream technique, such as LC-MS.

[0769] In some embodiments, the proteolytic digestion methods described herein produce a proteolytic digestion sample, including one comprising a proteolytic glycopeptide, having a digestion completion rate of at least about 70%, such as at least about any of 75%, 80%, 85%, 90%, 91%, 92%, 93%, 94%, 95%, 96%, 97%, 98%, or 99%. In some embodiments, the proteolytic digestion methods described herein produce a proteolytic digestion sample, including one comprising a proteolytic glycopeptide, wherein the sample volume loss is 10% or less, such as 9% or less, 8% or less, 7% or less, 6% or less, 5% or less, 4% or less, 3% or less, 2% or less, or 1% or less, based on all volumes added in producing the proteolytic digestion sample.

[0770] In the following sections, additional description of the various aspects of the proteolytic digestion techniques is provided. Such description in a modular fashion is not intended to limit the scope of the disclosure, and based on the teachings provided herein one of ordinary skill in the art will readily appreciate that certain modules can be integrated, at least in part. The section heading used herein are for organizational purposes only and are not to be construed as limiting the subject matter described.

### I. Thermal Denaturation Techniques

[0771] In certain aspects, the methods provided herein comprise performing a thermal denaturation technique. Thermal denaturation techniques, generally speaking, change certain polypeptides conformational structures, such as by unfolding and/or linearizing a polypeptide, to enable protease access to cleavage sites. Thermal denaturation techniques described herein comprise subjecting a sample, or a derivative thereof (e.g., a sample diluted with a buffer), to a thermal treatment of about 60° C. to about 100° C. for thermal denaturation incubation time of at least about 1 minute. In some embodiments, the thermal denaturation technique is not performed concurrently with a chemical denaturation technique, such as using high concentrations of denaturing agent, e.g., 6M urea. In some embodiments, the method does not include use of a chemical denaturation technique.

[0772] In some embodiments, the thermal denaturation incubation time is performed at a temperature of about 60° C. to about 100° C., such as any of about 70° C. to about 100° C., about 80° C. to about 100° C., about 90° C. to about 100° C., about 95° C. to about 100° C., or about 85° C. to about 95° C. In some embodiments, the thermal denaturation incubation time is performed at a temperature of at least about 60° C., such as at least about any of 65° C., 70° C., 75° C., 80° C., 85° C., 90° C., 95° C., or 100° C. In some embodiments, the thermal denaturation incubation time is performed at a temperature of about 100° C. or less, such as about any of 95° C. or less, 90° C. or less, 85° C. or less, 80° C. or less, 75° C. or less, 70° C. or less, 65° C. or less, 60° C. or less. In some embodiments, the thermal denaturation incubation time is performed at a temperature of about any of 60° C., 65° C., 70° C., 75° C., 80° C., 85° C., 90° C., 91° C., 92° C., 93° C., 94° C., 95° C., 96° C., 97° C., 98° C., 99° C., or 100° C.

[0773] In some embodiments, the thermal denaturation incubation time is about 1 minute to about 15 minutes, such as any of about 1 minute to about 5 minutes, about 1 minute to about 10 minutes, about 2.5 minutes to about 7.5 minutes, or about 5 minutes to about 15 minutes. In some embodiments, the thermal denaturation incubation time is at least about 1 minute, such as at least about any of 1.5 minutes, 2 minutes, 2.5 minutes, 3 minutes, 3.5 minutes, 4 minutes, 4.5 minutes, 5 minutes, 5.5 minutes, 6 minutes, 6.5 minutes, 7 minutes, 7.5 minutes, 8 minutes, 8.5 minutes, 9 minutes, 9.5 minutes, 10 minutes, 11 minutes, 12 minutes, 13 minutes, 14 minutes, or 15 minutes. In some embodiments, the thermal denaturation incubation time is about 15 minutes or less, such as about any of 14 minutes or less, 13 minutes or less, 12 minutes or less, 11 minutes or less, 10 minutes or less, 9.5 minutes or less, 9 minutes or less, 8.5 minutes or less, 8 minutes or less, 7.5 minutes or less, 7 minutes or less, 6.5 minutes or less, 6 minutes or less, 5.5 minutes or less, 5 minutes or less, 4.5 minutes or less, 4 minutes or less, 3.5 minutes or less, 3 minutes or less, 2.5 minutes or less, 2 minutes or less, 1.5 minutes or less, or 1 minute or less. In some embodiments, the thermal denaturation incubation time is about any of 1 minute, 1.5 minutes, 2 minutes, 2.5 minutes, 3 minutes, 3.5 minutes, 4 minutes, 4.5 minutes, 5 minutes, 5.5 minutes, 6 minutes, 6.5 minutes, 7 minutes, 7.5 minutes, 8 minutes, 8.5 minutes, 9 minutes, 9.5 minutes, 10 minutes, 11 minutes, 12 minutes, 13 minutes, 14 minutes, or 15 minutes.

[0774] In some embodiments, the thermal denaturation technique comprises a thermal denaturation incubation time of about 1 minute to about 15 minutes, such as about any of 1 minute, 2 minutes, 3 minutes, 4 minutes, 5 minutes, 6 minutes, 7 minutes, 8 minutes, 9 minutes 10 minutes, 11 minutes, 12 minutes, 13 minutes, 14 minutes, or 15 minutes, wherein the thermal denaturation incubation is performed at a temperature of about 60° C. to about 100° C., such about any of 60° C., 65° C., 70° C., 75° C., 80° C., 85° C., 90° C., 91° C., 92° C., 93° C., 94° C., 95° C., 96° C., 97° C., 98° C., 99° C., or 100° C.

[0775] The thermal denaturation incubation temperature can be controlled by numerous techniques and combinations thereof. In some embodiments, the thermal denaturation incubation temperature is controlled by a water bath. In some embodiments, the thermal denaturation incubation temperature is controlled by a heat block. In some embodiments, the thermal denaturation incubation temperature is controlled by a thermocycler, e.g., a thermocycler with a lid temperature control element. As described herein, in some embodiments, control of sample temperature when performed using a thermocycler is via a temperature block element. In some embodiments, temperature changes prior to and/or after the thermal denaturation incubation time temperature are controlled by a technique described herein, such as cooling at room temperature or via the thermocycler.

[0776] In some embodiments, the thermal denaturation technique comprises subjecting a sample, or a derivative thereof, e.g., a sample diluted in a buffer, to a thermal cycle. In some embodiments, the thermal cycle comprises subjecting the sample, or a derivative thereof, to one or more of: (a) a block starting temperature (b) block set temperature (the temperature for the thermal denaturation incubation time); (c) a block ending temperature; (d) one or more ramp rates between temperature changes in the thermal cycle (such as between the block starting temperature and the block set temperature or between the block set temperature and the block ending temperature); and (e) a lid temperature relative to the block temperature. In some embodiments, the thermal cycle is performed, in whole or in part, using a thermocycler. In some embodiments, the thermal cycle is configured to reduce and/or prevent loss of sample, such as by escaping vapor and/or condensation when the sample container is opened. In some embodiments, the thermal cycle comprises a set block temperature of about 60° C. to about 100° C., including about any of 60° C., 65° C., 70° C., 75° C., 80° C., 85° C., 90° C., 91° C., 92° C., 93° C., 94° C., 95° C., 96° C., 97° C., 98° C., 99° C., or 100° C. In some embodiments, the thermal cycle comprises: (a) a set block temperature of about 60° C. to about 100° C., including about any of 60° C., 65° C., 70° C., 75° C., 80° C., 85° C., 90° C., 91° C., 92° C., 93° C., 94° C., 95° C., 96° C., 97° C., 98° C., 99° C., or 100° C., and (b) a block ending temperature of about 15° C. to about 35° C., such as any of about 20° C. to about 35° C., or about 20° C. to about 25° C. In some embodiments, the thermal cycle comprises: (a) starting block temperature of about 15° C. to about 50° C., such as any of 15° C. to about 25° C., about 20° C. to about 30° C., or about 20° C. to about 25° C., including about any of 20° C., 21° C., 22° C., 23° C., 24° C., 25° C., (b) a set block temperature of about 60° C. to about 100° C., such about any of 60° C., 65° C., 70° C., 75° C., 80° C., 85° C., 90° C., 91° C., 92° C., 93° C., 94° C., 95° C., 96° C., 97° C., 98° C., 99° C., or 100° C., and (c) a block ending temperature of about 15° C. to about 35° C., such as any of about 20° C. to about 35° C., or about 20° C. to about 25° C. In any of the thermal cycles described herein, in some embodiments, the lid temperature during the thermal cycle is configured to reduce and/or inhibit condensate formation near or on the lid of a sample container. In some embodiments, the lid temperature during the thermal cycle is at least about 2° C., such as at least about any of 2.5° C., 3° C., 3.5° C., 4° C., 4.5° C., 5° C., 5.5° C., 6° C., 6.5° C., 7° C., 7.5° C., 8° C., 8.5° C., 9° C., 9.5° C., 10° C., 11° C., 12° C., 13° C., 14° C., 15° C., 16° C., 17° C., 18° C., 19° C., or 20° C., higher than the respective temperature of the block during the thermal cycle. In some embodiments, the lid temperature during at least a portion of a thermal cycle is about 102° C. to about 120° C., such as about any of 103° C., 104° C., 105° C., 106° C., 107° C., 108° C., 109° C., or 110° C. In some embodiments, the lid temperature during the thermal cycle may be the same respective temperature of the block during the thermal cycle or a temperature greater than the temperature of the block during the thermal cycle. In some embodiments, the lid temperature during the thermal cycle may be the same respective temperature of the block during the thermal cycle or a temperature greater than the temperature of the block during the thermal cycle.

[0777] In some embodiments, the ramp rate between a temperature change in a thermal cycle (such as between a block starting temperature and a block set temperature and/or between a block set temperature a the block ending temperature) is about 1° C./second to about 10° C./second, such as any of 1° C./second, 1.5° C./second, 2° C./second, 2.5° C./second, 3° C./second, 3.5° C./second, 4° C./second, 4.5° C./second, 5° C./second, 5.5° C./second, 6° C./second, 6.5° C./second, 7° C./second, 7.5° C./second, 8° C./second, 8.5° C./second, 9° C./second, 9.5° C./second, or 10° C./second.

[0778] In some embodiments, the method further comprises admixing an amount of a biological sample a buffer prior to the thermal denaturation technique (e.g., the buffered sample is subjected to a thermal denaturation technique described herein). In some embodiment, the amount (as assessed based on the final concentration in the sample containing solution containing solution) of the buffer is about 1 mM to about 100 mM, such as any of about 20 mM to about 80 mM, about 30 mM to about 70 mM, or about 40 mM to about 60 mM. In some embodiment, the amount of the buffer is about any of 10 mM, 15 mM, 20 mM, 25 mM, 30 mM, 35 mM, 40 mM, 45 mM, 50 mM, 55 mM, 60 mM, 65 mM, 70 mM, 75 mM, 80 mM, 85 mM, 90 mM, 95 mM, or 100 mM. In some embodiments, the buffer is selected from the group consisting of ammonium bicarbonate, ammonium acetate, ammonium formate, triethylammonium bicarbonate, and Tris-HCl, or any combination thereof.

[0779] In some embodiments, the method further comprises determining the protein concentration in a biological sample or a derivative thereof.

### II. Reduction Techniques

[0780] In certain aspects, the methods provided herein comprise performing a reduction technique. In some embodiments, the reduction technique is performed on a sample, or a derivative thereof, following thermal denaturation. Reduction techniques, generally speaking, reduce (e.g., cleave) disulfide linkages between cysteine residues of one or more polypeptides to reduce the presence of polypeptide conformations that inhibit or prevent protease cleavage of the one or more polypeptides. Reduction techniques described herein comprise subjecting a sample, or a derivative thereof (e.g., a denatured sample), to an amount of a reducing agent and incubating for a reducing incubation time performed at a temperature or range thereof.

[0781] In some embodiments, the reducing agent is dithiothreitol (DTT), tris(2-carboxyethyl) phosphine (TCEP), beta-mercaptoethanol (BME), or a cysteine, or any mixture thereof.

[0782] In some embodiments, the amount (as assessed based on the final concentration in the sample containing solution containing solution) of a reducing agent, e.g., DTT, used in a reduction technique is about 1 mM to about 100 mM, such as any of about 1 mM to about 40 mM, about 1 mM to about 30 mM, about 5 mM to about 25 mM, about 10 mM, to about 20 mM, 20 mM to about 80 mM, about 30 mM to about 70 mM, or about 40 mM to about 60 mM. In some embodiments, the amount of reducing agent used in a reduction technique is at least about 1 mM, such as at least about any of 2 mM, 3 mM, 4 mM, 5 mM, 6 mM, 7 mM, 8 mM, 9 mM, 10 mM, 11 mM, 12 mM, 13 mM, 14 mM, 15 mM, 16 mM, 17 mM, 18 mM, 19 mM, 20 mM, 25 mM, 30 mM, 35 mM, 40 mM, 45 mM, 50 mM, 55 mM, 60 mM, 65 mM, 70 mM, 75 mM, 80 mM, 85 mM, 90 mM, 95 mM, or 100 mM. In some embodiments, the amount of reducing agent used in a reduction technique is about 100 mM or less, such as about any of 95 mM or less, 90 mM or less, 85 mM or less, 80 mM or less, 75 mM or less, 70 mM or less, 65 mM or less, 60 mM or less, 55 mM or less, 50 mM or less, 45 mM or less, 40 mM or less, 35 mM or less, 30 mM or less, 25 mM or less, 20 mM or less, 19 or less, 18 or less, 17 or less, 16 or less, 15 or less, 14 or less, 13 or less, 12 or less, 11 or less, 10 or less, 9 or less, 8 or less, 7 or less, 6 or less, 5 or less, 4 or less, 3 or less, 2 or less, or 1 or less. In some embodiments, the amount of reducing agent used in a reduction technique is about any of 1 mM, 2 mM, 3 mM, 4 mM, 5 mM, 6 mM, 7 mM, 8 mM, 9 mM, 10 mM, 11 mM, 12 mM, 13 mM, 14 mM, 15 mM, 16 mM, 17 mM, 18 mM, 19 mM, 20 mM, 25 mM, 30 mM, 35 mM, 40 mM, 45 mM, 50 mM, 55 mM, 60 mM, 65 mM, 70 mM, 75 mM, 80 mM, 85 mM, 90 mM, 95 mM, or 100 mM.

[0783] In some embodiments, the reduction incubation time is about 10 minutes to about 120 minutes, such as any of about 30 minutes to about 60 minutes, about 40 minutes to about 60 minutes, about 45 minutes to about 55 minutes. In some embodiments, the reduction incubation time is at least about 20 minutes, such as at least about any of 25 minutes, 30 minutes, 35 minutes, 40 minutes, 45 minutes, 50 minutes, 55 minutes, 60 minutes, 65 minutes, 70 minutes, 75 minutes, 80 minutes, 85 minutes, 90 minutes, 95 minutes, 100 minutes, 105 minutes, 110 minutes, 115 minutes. In some embodiments, the reduction incubation time is about 120 minutes or less, such as about any of 115 minutes or less, 110 minutes or less, 105 minutes or less, 100 minutes or less, 95 minutes or less, 90 minutes or less, 85 minutes or less, 80 minutes or less, 75 minutes or less, 70 minutes or less, 65 minutes or less, 60 minutes or less, 55 minutes or less, 50 minutes or less, 45 minutes or less, 40 minutes or less, 35 minutes or less, 30 minutes or less, or 25 minutes or less. In some embodiments, the reduction incubation time is about any of 20 minutes, 25 minutes, 30 minutes, 35 minutes, 40 minutes, 45 minutes, 50 minutes, 55 minutes, 60 minutes, 65 minutes, 70 minutes, 75 minutes, 80 minutes, 85 minutes, 90 minutes, 95 minutes, 100 minutes, 105 minutes, 110 minutes, 115 minutes.

[0784] In some embodiments, the reduction incubation time is performed at a temperature of about 20° C. to about 100° C., such as any of about 40° C. to about 80° C., about 50° C. to about 70° C., about 50° C. to about 60° C., about 55° C. to about 65° C., or about 60° C. to about 70° C. In some embodiments, the reduction incubation time is performed at a temperature of at least about 20° C., such as at least about any of 25° C., 30° C., 35° C., 40° C., 45° C., 50° C., 55° C., 60° C., 65° C., 70° C., 75° C., 80° C., 85° C., 90° C., or 95° C. In some embodiments, the reduction incubation time is performed at a temperature of about 95° C. or less, such as about any of 90° C. or less, 85° C. or less, 80° C. or less, 75° C. or less, 70° C. or less, 65° C. or less, 60° C. or less, 55° C. or less, 50° C. or less, 45° C. or less, 40° C. or less, 35° C. or less, 30° C. or less, or 25° C. or less. In some embodiments, the reduction incubation time is performed at a temperature of about any of 20° C., 25° C., 30° C., 35° C., 40° C., 45° C., 50° C., 51° C., 52° C., 53° C., 54° C., 55° C., 56° C., 57° C., 58° C., 59° C., 60° C., 61° C., 62° C., 63° C., 64° C., 65° C., 66° C., 67° C., 68° C., 69° C., 70° C., 75° C., 80° C., 85° C., 90° C., or 95° C. In some embodiments, the reduction incubation time is performed at a room temperature.

[0785] In some embodiments, the reduction technique comprises a reduction incubation time of about 30 minutes to about 70 minutes, such as about any of 35 minutes, 40 minutes, 45 minutes, 50 minutes, 55 minutes, 60 minutes, or 65 minutes, wherein the reduction incubation time is performed at a temperature of about 50° C. to about 70° C., such about any of 55° C., 60° C., or 65° C. In some embodiments, the reduction technique comprises use of an amount (as assessed based on the final concentration in the sample containing solution) of a reducing agent, e.g., DTT, of about 5 mM to about 25 mM, such as any of about 6 mM, 7 mM, 8 mM, 9 mM, 10 mM, 11 mM, 12 mM, 13 mM, 14 mM, 15 mM, 16 mM, 17 mM, 18 mM, 19 mM, 20 mM, 21 mM, 22 mM, 23 mM, or 24 mM, and a reduction incubation time of about 30 minutes to about 70 minutes, such as about any of 35 minutes, 40 minutes, 45 minutes, 50 minutes, 55 minutes, 60 minutes, or 65 minutes, wherein the reduction incubation time is performed at a temperature of about 50° C. to about 70° C., such about any of 55° C., 60° C., or 65° C.

[0786] The reduction incubation temperature can be controlled by numerous techniques and combinations thereof. In some embodiments, the reduction incubation temperature is controlled by an ambient temperature, such as room temperature. In some embodiments, the reduction incubation temperature is controlled by a water bath. In some embodiments, the reduction incubation temperature is controlled by a heat block. In some embodiments, the reduction incubation temperature is controlled by a thermocycler, e.g., a thermocycler with a lid temperature control element. As described herein, in some embodiments, control of sample temperature when performed using a thermocycler is via a temperature block element. In some embodiments, temperature changes prior to and/or after the reduction incubation time temperature are controlled by a technique described herein, such as cooling at room temperature or a ramp rate.

[0787] In some embodiments, the reduction technique comprises subjecting a sample, or a derivative thereof, e.g., a denatured sample, to a thermal cycle. In some embodiments, the thermal cycle comprises subjecting the sample, or a derivative thereof, to one or more of: (a) a block starting temperature (b) block set temperature (the temperature for the reduction incubation time); (c) a block ending temperature; (d) one or more ramp rates between temperature changes in the thermal cycle (such as between the block starting temperature and the block set temperature or between the block set temperature and the block ending temperature); and (e) a lid temperature relative to the block temperature. In some embodiments, the thermal cycle is performed, in whole or in part, using a thermocycler. In some embodiments, the thermal cycle is configured to reduce and/or prevent loss of sample, such as by escaping vapor and/or condensation when the sample container is opened. In some embodiments, the thermal cycle comprises a set block temperature of about 20° C. to about 100° C., such as any of 40° C. to about 80° C., about 50° C. to about 70° C., about 50° C. to about 60° C., about 55° C. to about 65° C., or about 60° C. to about 70° C., including about any of 50° C., 55° C., 60° C., 65° C., or 70° C. In some embodiments, the thermal cycle comprises: (a) a set block temperature of about 20° C. to about 100° C., such as any of about 40° C. to about 80° C., about 50° C. to about 70° C., about 50° C. to about 60° C., about 55° C. to about 65° C., or about 60° C. to about 70° C., including about any of 50° C., 55° C., 60° C., 65° C., or 70° C., and (b) a block ending temperature of about 15° C. to about 35° C., such as any of about 20° C. to about 35° C., or about 20° C. to about 25° C. In some embodiments, the thermal cycle comprises: (a) starting block temperature of about 15° C. to about 60° C., such as any of about 15° C. to about 50° C., about 20° C. to about 40° C., about 20° C. to about 30° C., or about 20° C. to about 25° C., (b) a set block temperature of about 20° C. to about 100° C., such as any of about 40° C. to about 80° C., about 50° C. to about 70° C., about 50° C. to about 60° C., about 55° C. to about 65° C., or about 60° C. to about 70° C., including about any of 50° C., 55° C., 60° C., 65° C., or 70° C., and (c) a block ending temperature of about 15° C. to about 35° C., such as any of about 20° C. to about 35° C., or about 20° C. to about 25° C. In any of the thermal cycles described herein, in some embodiments, the lid temperature during the thermal cycle is configured to reduce and/or inhibit condensate formation near or on the lid of a sample container. In some embodiments, the lid temperature during the thermal cycle is at least about 2° C., such as at least about any of 2.5° C., 3° C., 3.5° C., 4° C., 4.5° C., 5° C., 5.5° C., 6° C., 6.5° C., 7° C., 7.5° C., 8° C., 8.5° C., 9° C., 9.5° C., 10° C., 11° C., 12° C., 13° C., 14° C., 15° C., 16° C., 17° C., 18° C., 19° C., or 20° C., higher than the respective temperature of the block during the thermal cycle. In some embodiments, the lid temperature during at least a portion of a thermal cycle is about 102° C. to about 120° C., such as about any of 103° C., 104° C., 105° C., 106° C., 107° C., 108° C., 109° C., or 110° C.

[0788] In some embodiments, the ramp rate between a temperature change in a thermal cycle (such as between a block starting temperature and a block set temperature and/or between a block set temperature a the block ending temperature) is about 1° C./second to about 10° C./second, such as any of 1° C./second, 1.5° C./second, 2° C./second, 2.5° C./second, 3° C./second, 3.5° C./second, 4° C./second, 4.5° C./second, 5° C./second, 5.5° C./second, 6° C./second, 6.5° C./second, 7° C./second, 7.5° C./second, 8° C./second, 8.5° C./second, 9° C./second, 9.5° C./second, or 10° C./second.

[0789] In some embodiments, the reduction technique described herein is completed simultaneously with a thermal denaturation step. For example, the combined thermal denaturation technique and reduction technique comprises adding a reducing agent to a sample, or a derivative thereof, and then subjecting the sample, or the derivative thereof, to a temperature of about 60° C. to about 100° C., such about any of 60° C., 65° C., 70° C., 75° C., 80° C., 85° C., 90° C., 91° C., 92° C., 93° C., 94° C., 95° C., 96° C., 97° C., 98° C., 99° C., or 100° C., for an incubation time of at least about 1 minute, such as at least about any of 2 minutes, 3 minutes, 4 minutes, 5 minutes, 10 minutes, 15 minutes, 20 minutes, 25 minutes, 30 minutes, 35 minutes, 40 minutes, 45 minutes, 50 minutes, 55 minutes, or 60 minutes. In some embodiments, the combined thermal denaturation technique and reduction technique comprises adding a reducing agent to a sample, or a derivative thereof, and then subjecting the sample, or the derivative thereof, to a temperature of about 90° C. to about 100° C., for an incubation time of about 40 minutes to about 60 minutes, including 50 minutes.

### III. Alkylation Techniques

[0790] In certain aspects, the methods provided herein comprise performing an alkylation technique. In some embodiments, the alkylation technique is performed on a sample, or a derivative thereof, following the performance of a reduction technique. Alkylation techniques, generally speaking, prevent the reformation of one or more disulfide linkages between, e.g., cysteine residues of one or more polypeptides. This is done by, e.g., the addition of an acetamide moiety to the sulfur of a cysteine residue thereby producing an alkylated polypeptide. Alkylation techniques may reduce the presence of polypeptide conformations that inhibit or prevent protease cleavage of the one or more polypeptides. Alkylation techniques described herein comprise subjecting a sample, or a derivative thereof (e.g., a reduced sample), to an amount of an alkylating agent and incubating for an alkylation incubation time performed at a temperature or range thereof. In some embodiments, the method comprises subjecting a denatured sample to a reduction technique followed by an alkylation technique prior to performing a proteolytic digestion technique.

[0791] In some embodiments, the alkylating agent is iodoacetamide (IAA), 2-chloroacetamide, an acetamide salt, or any mixture thereof.

[0792] In some embodiments, the amount (as assessed based on the final concentration in the sample containing solution) of an alkylating agent, e.g., IAA, used in an alkylation technique is about 10 mM to about 100 mM, such as any of about 10 mM to about 50 mM, about 20 mM to about 40 mM, about 20 mM to about 36 mM, about 15 mM to about 25 mM, about 20 mM to about 25 mM, about 20 mM to about 80 mM, about 30 mM to about 70 mM, or about 40 mM to about 60 mM. In some embodiments, the amount of an alkylating agent used in an alkylation technique is at least about 10 mM, such as at least about any of 15 mM, 16 mM, 17 mM, 18 mM, 19 mM, 20 mM, 21 mM, 22 mM, 23 mM, 24 mM, 25 mM, 30 mM, 35 mM, 40 mM, 45 mM, 50 mM, 55 mM, 60 mM, 65 mM, 70 mM, 75 mM, 80 mM, 85 mM, 90 mM, 95 mM, or 100 mM. In some embodiments, the amount of an alkylating agent used in an alkylation technique is about 100 mM or less, such as about any of 95 mM or less, 90 mM or less, 85 mM or less, 80 mM or less, 75 mM or less, 70 mM or less, 65 mM or less, 60 mM or less, 55 mM or less, 50 mM or less, 45 mM or less, 40 mM or less, 35 mM or less, 30 mM or less, 25 mM or less, 24 mM or less, 23 mM or less, 22 mM or less, 21 mM or less, 20 mM or less, 19 mM or less, 18 mM or less, 17 mM or less, 16 mM or less, 15 mM or less, or 10 mM or less. In some embodiments, the amount of an alkylating agent used in an alkylation technique is about any of 10 mM, 15 mM, 20 mM, 20.5 mM, 21 mM, 21.5 mM, 22 mM, 22.5 mM, 23 mM, 23.5 mM, 24 mM, 24.5 mM, 25 mM, 30 mM, 35 mM, 40 mM, 45 mM, 50 mM, 55 mM, 60 mM, 65 mM, 70 mM, 75 mM, 80 mM, 85 mM, 90 mM, 95 mM, or 100 mM.

[0793] In some embodiments, the alkylation incubation time is about 5 minutes to about 60 minutes, such as any of about 10 minutes to about 50 minutes, about 20 minutes to about 40 minutes, about 25 minutes to about 35 minutes. In some embodiments, the alkylation incubation time is at least about 5 minutes, such as at least about any of 10 minutes, 15 minutes, 20 minutes, 25 minutes, 30 minutes, 35 minutes, 40 minutes, 45 minutes, 50 minutes, 55 minutes, or 60 minutes. In some embodiments, the alkylation incubation time is about 60 minutes or less, such as about any of 55 minutes or less, 50 minutes or less, 45 minutes or less, 40 minutes or less, 35 minutes or less, 30 minutes or less, 25 minutes or less, 20 minutes or less, 15 minutes or less, 10 minutes or less, or 5 minutes or less. In some embodiments, the alkylation incubation time is about any of 5 minutes, 10 minutes, 15 minutes, 20 minutes, 25 minutes, 30 minutes, 35 minutes, 40 minutes, 45 minutes, 50 minutes, 55 minutes, or 60 minutes.

[0794] In some embodiments, the alkylation incubation time is performed at a temperature of about 15° C. to about 100° C., such as any of about 15° C. to about 80° C., about 15° C. to about 60° C., about 15° C. to about 35° C., about 20° C. to about 30° C., or about 20° C. to about 25° C. In some embodiments, the alkylation incubation time is performed at a temperature of at least about 15° C., such as at least about any of 20° C., 21° C., 22° C., 23° C., 24° C., 25° C., 30° C., 35° C., 40° C., 45° C., 50° C., 55° C., 60° C., 65° C., 70° C., 75° C., 80° C., 85° C., 90° C., or 95° C. In some embodiments, the alkylation incubation time is performed at a temperature of about 95° C. or less, such as about any of 90° C. or less, 85° C. or less, 80° C. or less, 75° C. or less, 70° C. or less, 65° C. or less, 60° C. or less, 55° C. or less, 50° C. or less, 45° C. or less, 40° C. or less, 35° C. or less, 30° C. or less, 25° C. or less, 24° C. or less, 23° C. or less, 22° C. or less, 21° C. or less, or 20° C. or less. In some embodiments, the alkylation incubation time is performed at a temperature of about any of 15° C., 16° C., 17° C., 18° C., 19° C., 20° C., 21° C., 22° C., 23° C., 24° C., 25° C., 30° C., 35° C., 40° C., 45° C., 50° C., 51° C., 52° C., 53° C., 54° C., 55° C., 56° C., 57° C., 58° C., 59° C., 60° C., 61° C., 62° C., 63° C., 64° C., 65° C., 66° C., 67° C., 68° C., 69° C., 70° C., 75° C., 80° C., 85° C., 90° C., or 95° C. In some embodiments, the alkylation incubation time is performed at a room temperature.

[0795] In some embodiments, the alkylation technique comprises an alkylation incubation time of about 5 minutes to about 60 minutes, such as about any of 15 minutes, 20 minutes, 25 minutes, 30 minutes, 35 minutes, or 40 minutes, wherein the alkylation incubation time is performed at a temperature of about 15° C. to about 30° C., such about any of 20° C., 21° C., 22° C., 23° C., 24° C., 25° C. In some embodiments, the alkylation technique comprises use of an amount (containing solution based on the final concentration in the sample) of an alkylating agent, e.g., IAA, of about 15 mM to about 40 mM, such as any of about 20 mM, 20.5 mM, 21 mM, 21.5 mM, 22 mM, 22.5 mM, 23 mM, 23.5 mM, 24 mM, 24.5 mM, 25 mM, 25.5 mM, 26 mM, 26.5 mM, 27 mM, 27.5 mM, 28 mM, 28.5 mM, 29 mM, 29.5 mM, 30 mM, 30.5 mM, 31 mM, 31.5 mM, 32 mM, 32.5 mM, 33 mM, 33.5 mM, 34 mM, 34.5 mM, 35 mM, 35.5 mM, 36 mM, 36.5 mM, 37 mM, 37.5 mM, 38 mM, and an alkylation incubation time of about 5 minutes to about 60 minutes, such as about any of 15 minutes, 20 minutes, 25 minutes, 30 minutes, 35 minutes, or 40 minutes, wherein the alkylation incubation time is performed at a temperature of about 15° C. to about 30° C., such about any of 20° C., 21° C., 22° C., 23° C., 24° C., or 25° C.

[0796] The alkylation incubation temperature can be controlled by numerous techniques and combinations thereof. In some embodiments, the alkylation incubation temperature is controlled by an ambient temperature, such as room temperature. In some embodiments, the alkylation incubation temperature is controlled by a water bath. In some embodiments, the alkylation incubation temperature is controlled by a heat block. In some embodiments, the alkylation incubation temperature is controlled by a thermocycler, e.g., a thermocycler with a lid temperature control element. As described herein, in some embodiments, control of sample temperature when performed using a thermocycler is via a temperature block element. In some embodiments, temperature changes prior to and/or after the alkylation incubation time temperature are controlled by a technique described herein, such as cooling at room temperature or a ramp rate.

[0797] In some embodiments, the alkylation technique comprises subjecting a sample, or a derivative thereof, e.g., a denatured sample, to a thermal cycle. In some embodiments, the thermal cycle comprises subjecting the sample, or a derivative thereof, to one or more of: (a) a block starting temperature (b) block set temperature (the temperature for the alkylation incubation time); (c) a block ending temperature; (d) one or more ramp rates between temperature changes in the thermal cycle (such as between the block starting temperature and the block set temperature or between the block set temperature and the block ending temperature); and (e) a lid temperature relative to the block temperature. In some embodiments, the thermal cycle is performed, in whole or in part, using a thermocycler. In some embodiments, the thermal cycle is configured to reduce and/or prevent loss of sample, such as by escaping vapor and/or condensation when the sample container is opened. In some embodiments, the thermal cycle comprises a set block temperature of about 15° C. to about 30° C., such as any of 15° C. to about 25° C., about 20° C. to about 30° C., or about 20° C. to about 25° C., including about any of 20° C., 21° C., 22° C., 23° C., 24° C., or 25° C. In some embodiments, the thermal cycle comprises: (a) a set block temperature of about 15° C. to about 30° C., such as any of 15° C. to about 25° C., about 20° C. to about 30° C., or about 20° C. to about 25° C., including about any of 20° C., 21° C., 22° C., 23° C., 24° C., 25° C., and (b) a block ending temperature of about 15° C. to about 35° C., such as any of about 20° C. to about 35° C., or about 20° C. to about 25° C. In some embodiments, the thermal cycle comprises: (a) starting block temperature of about 15° C. to about 30° C., such as any of 15° C. to about 25° C., about 20° C. to about 30° C., or about 20° C. to about 25° C., including about any of 20° C., 21° C., 22° C., 23° C., 24° C., 25° C., (b) a set block temperature of about 15° C. to about 30° C., such as any of 15° C. to about 25° C., about 20° C. to about 30° C., or about 20° C. to about 25° C., including about any of 20° C., 21° C., 22° C., 23° C., 24° C., 25° C., and (c) a block ending temperature of about 15° C. to about 35° C., such as any of about 20° C. to about 35° C., or about 20° C. to about 25° C. In any of the thermal cycles described herein, in some embodiments, the lid temperature during the thermal cycle is configured to reduce and/or inhibit condensate formation near or on the lid of a sample container. In some embodiments, the lid temperature during the thermal cycle is at least about 2° C., such as at least about any of 2.5° C., 3° C., 3.5° C., 4° C., 4.5° C., 5° C., 5.5° C., 6° C., 6.5° C., 7° C., 7.5° C., 8° C., 8.5° C., 9° C., 9.5° C., 10° C., 11° C., 12° C., 13° C., 14° C., 15° C., 16° C., 17° C., 18° C., 19° C., or 20° C., higher than the respective temperature of the block during the thermal cycle. In some embodiments, the lid temperature during at least a portion of a thermal cycle is about 102° C. to about 120° C., such as about any of 103° C., 104° C., 105° C., 106° C., 107° C., 108° C., 109° C., or 110° C.

[0798] In some embodiments, the alkylation technique further comprises quenching the alkylating agent comprising use of a neutralizing agent. In some embodiments, the neutralizing agent is a reducing agent. In some embodiments, the reducing agent is dithiothreitol (DTT), tris(2-carboxyethyl) phosphine (TCEP), beta-mercaptoethanol (BME), or a cysteine, or any mixture thereof. In some embodiments, the neutralizing agent is added in an amount to fully quench the amount of the alkylating agent, such as in an amount greater than or equal to a molar amount of an active moiety of the alkylating agent. In some embodiments, the amount (as assessed based on the final concentration in the sample containing solution) of the neutralizing agent is about 1 mM to about 100 mM.

[0799] In some embodiments, the alkylation technique, in whole or in part, is performed substantially in a low light condition. In some embodiments, the alkylation incubation time is performed in a low light condition. In some embodiments, the low light condition is in the dark or a location substantially devoid of sunlight and/or room lighting, such as in a desk drawer. In some embodiments, the low light condition is a filtered light, such as red light.

[0800] In some embodiments, the alkylating agent is sourced from a stock solution. In some embodiments, the stock solution is prepared within about 1 hour, such as within about any of 50 minutes, 40 minutes, 30 minutes, 20 minutes, or 10 minutes, of use.

[0801] In some embodiments, the ramp rate between a temperature change in a thermal cycle (such as between a block starting temperature and a block set temperature and/or between a block set temperature a the block ending temperature) is about 1° C./second to about 10° C./second, such as any of 1° C./second, 1.5° C./second, 2° C./second, 2.5° C./second, 3° C./second, 3.5° C./second, 4° C./second, 4.5° C./second, 5° C./second, 5.5° C./second, 6° C./second, 6.5° C./second, 7° C./second, 7.5° C./second, 8° C./second, 8.5° C./second, 9° C./second, 9.5° C./second, or 10° C./second.

### IV. Proteolytic Digestion Techniques

[0802] In certain aspects, the methods provided herein comprise performing a proteolytic digestion technique. In some embodiments, the proteolytic digestion technique is performed on a sample, or a derivative thereof, following thermal denaturation and/or any additional steps intended to expose protease cleavage sites. Proteolytic digestion techniques, generally speaking, cleave polypeptides at known cleavage sites. For example, trypsin is a serine protease that generally cleaves polypeptides at the carboxyl side (C-terminal side) of lysine and arginine residues. Certain exceptions apply to the cleavage pattern of trypsin, such as due to proximity of a proline residue and/or a post-translational modification causing steric hindrance relative to the cleavage site. Proteolytic digestion techniques described herein comprise subjecting a sample, or a derivative thereof (e.g., a denatured sample or an alkylated sample, including an alkylated sample subjected to a reduction technique prior to an alkylation technique), to an amount of one or more proteases and incubating for a digestion incubation time performed at a temperature or range thereof.

[0803] In some embodiments, each of the one or more proteases is trypsin, LysC, LysN, AspN, GluC, ArgC, IdeS, IdeZ, PNGase F, thermolysin, pepsin, elastase, TEV, or Factor Xa, or any mixture thereof. In some embodiments, wherein two or more proteases are used, the weight ratio between a first protease and a second protease is about 1:10 to about 10:1, such as about any of about 1:9, 1:8, 1:7: 1:6, 1:5, 1:4, 1:3, 1:2, or 1:1. In some embodiments, the one or more proteases is trypsin. In some embodiments, the one or more proteases is a mixture of trypsin and LysC, such as in a weight ratio of about 1:1. In some embodiments, the one or more proteases is selected based on the type and/or characteristic of a biological sample used in the methods herein. In some embodiments, the biological sample is a plasma sample, wherein the one or more proteases is trypsin and Lys-C, such as in a weight ratio of about 1:1. In some embodiments, the biological sample is a serum sample, wherein the one or more proteases is trypsin. In some embodiments, the protease is a modified protease, such as comprising a modification to prevent or inhibit self-proteolysis. In some embodiments, the modified protease is a modified trypsin, such as a methylated and/or an acetylated trypsin. In some embodiments, the modified trypsin is a tosyl phenylalanyl chloromethyl ketone (TPCK)-treated trypsin.

[0804] In some embodiments, the amount of a protease, e.g., trypsin or LysC, used in a proteolytic digestion technique is based on a weight ratio relative to the polypeptide content of a sample, or a derivative thereof, (i.e., weight of a protease: weight of polypeptide content) of about 1:200 to about 1:10, such as any of about 1:100 to about 1:10, about 1:50 to about 1:10, about 1:40 to about 1:20, about 1:50 to about 1:30, about 1:45 to about 1:35, about 1:20 to about 1:40, about 1:30 to about 1:10, or about 1:25 to about 1:15. In some embodiments, the amount of a protease used in a proteolytic digestion technique is at least about 1:200, such as at least about any of 1:190, 1:180, 1:170, 1:160, 1:150, 1:140, 1:130, 1:120, 1:110, 1:100, 1:95, 1:90, 1:85, 1:80, 1:75, 1:70, 1:65, 1:60, 1:55, 1:50, 1:45, 1:40, 1:35, 1:30, 1:25, 1:20, 1:15, or 1:10. In some embodiments, the amount of a protease used in a proteolytic digestion technique is about 1:10 or less, such as about any of 1:15 or less, 1:20 or less, 1:25 or less, 1:30 or less, 1:35 or less, 1:40 or less, 1:45 or less, 1:50 or less, 1:55 or less, 1:60 or less, 1:65 or less, 1:70 or less, 1:75 or less, 1:80 or less, 1:85 or less, 1:90 or less, 1:95 or less, 1:100 or less, 1:110 or less, 1:120 or less, 1:130 or less, 1:140 or less, 1:150 or less, 1:160 or less, 1:170 or less, 1:180 or less, 1:190 or less, or 1:200 or less. In some embodiments, the amount of a protease used in a proteolytic digestion technique is about any of 1:10, 1:15, 1:20, 1:25, 1:30, 1:35, 1:40, 1:45, 1:50, 1:55, 1:60, 1:65, 1:70, 1:75, 1:80, 1:85, 1:90, 1:95, 1:100, 1:110, 1:120, 1:130, 1:140, 1:150, 1:160, 1:170, 1:180, 1:190, or 1:200. In some embodiments, the proteolytic digestion technique comprises the use of two or more proteases, such as a combination of trypsin and LysC, and in such embodiments, the amount of each protease (such as described above) can be summed to a total amount of proteases used in a proteolytic digestion technique.

[0805] In some embodiments, the proteolytic digestion incubation time is about 20 minutes to about 36 hours, such as any of about 1 hour to about 18 hours, about 5 hours to about 24 hours, about 12 hours to about 24 hours, about 16 hours to about 20 hours, or about 12 hours to about 36 hours. In some embodiments, the proteolytic digestion incubation time is about 36 hours or less, such as about any of 32 hours or less, 30 hours or less, 28 hours or less, 26 hours or less, 24 hours or less, 22 hours or less, 20 hours or less, 19 hours or less, 18 hours or less, 17 hours or less, 16 hours or less, 15 hours or less, 14 hours or less, 13 hours or less, 12 hours or less, 11 hours or less, 10 hours or less, 9 hours or less, 8 hours or less, 7 hours or less, 6 hours or less, 5 hours or less, 4 hours or less, 3 hours or less, 2 hours or less, or 1 hours or less. In some embodiments, the proteolytic digestion incubation time is at least about 20 minutes, such as at least about any of 30 minutes, 40 minutes, 50 minutes, 1 hour, 2 hours, 3 hours, 4 hours, 5 hours, 6 hours, 7 hours, 8 hours, 9 hours, 10 hours, 11 hours, 12 hours, 13 hours, 14 hours, 15 hours, 16 hours, 17 hours, 18 hours, 19 hours, 20 hours, 22 hours, 24 hours, 26 hours, 28 hours, 30 hours, 32 hours, 34 hours, or 36 hours. In some embodiments, the proteolytic digestion incubation time is about any of 20 minutes, 30 minutes, 40 minutes, 50 minutes, 1 hour, 2 hours, 3 hours, 4 hours, 5 hours, 6 hours, 7 hours, 8 hours, 9 hours, 10 hours, 11 hours, 12 hours, 13 hours, 14 hours, 15 hours, 16 hours, 17 hours, 18 hours, 19 hours, 20 hours, 22 hours, 24 hours, 26 hours, 28 hours, 30 hours, 32 hours, 34 hours, or 36 hours.

[0806] In some embodiments, the digestion incubation time is performed at a temperature of about 20° C. to about 60° C., such as any of about 20° C. to about 25° C., about 20° C. to about 30° C., about 25° C. to about 40° C., about 35° C. to about 40° C., or about 35° C. to about 50° C. In some embodiments, the digestion incubation time is performed at a temperature of at least about 20° C., such as at least about any of 21° C., 22° C., 23° C., 24° C., 25° C., 26° C., 27° C., 28° C., 29° C., 30° C., 31° C., 32° C., 33° C., 34° C., 35° C., 36° C., 37° C., 38° C., 39° C., 40° C., 42° C., 44° C., 46° C., 48° C., 50° C., 52° C., 54° C., 56° C., 58° C., or 60° C. In some embodiments, the digestion incubation time is performed at a temperature of about 60° C. or less, such about any of 58° C. or less, 56° C. or less, 54° C. or less, 52° C. or less, 50° C. or less, 48° C. or less, 46° C. or less, 44° C. or less, 42° C. or less, 40° C. or less, 39° C. or less, 38° C. or less, 37° C. or less, 36° C. or less, 35° C. or less, 34° C. or less, 33° C. or less, 32° C. or less, 31° C. or less, 30° C. or less, 29° C. or less, 28° C. or less, 27° C. or less, 26° C. or less, 25° C. or less, 24° C. or less, 23° C. or less, 22° C. or less, 21° C. or less, or 20° C. or less. In some embodiments, the digestion incubation time is performed at a temperature of about any of 20° C., 21° C., 22° C., 23° C., 24° C., 25° C., 26° C., 27° C., 28° C., 29° C., 30° C., 31° C., 32° C., 33° C., 34° C., 35° C., 36° C., 37° C., 38° C., 39° C., 40° C., 42° C., 44° C., 46° C., 48° C., 50° C., 52° C., 54° C., 56° C., 58° C., or 60° C. In some embodiments, the reduction incubation time is performed at a room temperature.

[0807] In some embodiments, the proteolytic digestion technique comprises a digestion incubation time of about 12 hours to about 24 hours, such as about any of 13 hours, 14 hours, 15 hours, 16 hours, 17 hours, 18 hours, 19 hours, 20 hours, 21 hours, 22 hours, 23 hours, wherein the digestion incubation time is performed at a temperature of about 20° C. to about 40° C., such about any of 22° C., 24° C., 26° C., 28° C., 30° C., 31° C., 32° C., 33° C., 34° C., 35° C., 36° C., 37° C., 38° C., 39° C. In some embodiments, the proteolytic digestion technique comprises use of an amount a protease for each of one or more proteases, e.g., trypsin and/or LysC, of about 1:15 to about 1:45, such as about any of 1:20, 1:25, 1:30, 1:35, or 1:40 (as measured based on the amount of the protease to the amount of polypeptide in a sample or a derivative thereof), and a digestion incubation time of about 12 hours to about 24 hours, such as about any of 13 hours, 14 hours, 15 hours, 16 hours, 17 hours, 18 hours, 19 hours, 20 hours, 21 hours, 22 hours, 23 hours, wherein the digestion incubation time is performed at a temperature of about 20° C. to about 40° C., such about any of 22° C., 24° C., 26° C., 28° C., 30° C., 31° C., 32° C., 33° C., 34° C., 35° C., 36° C., 37° C., 38° C., 39° C. In some embodiments, the proteolytic digestion technique is performed on a plasma sample or a derivate thereof, wherein the proteolytic digestion technique comprises a 1:40 ratio of trypsin to polypeptide in the sample of the derivative thereof and a 1:40 ratio of LysC to polypeptide in the sample or the derivative thereof. In some embodiments, the proteolytic digestion technique is performed on a serum sample or a derivate thereof, wherein the proteolytic digestion technique comprises a 1:20 ratio of trypsin.

[0808] The digestion incubation temperature can be controlled by numerous techniques and combinations thereof. In some embodiments, the digestion incubation temperature is controlled by an ambient temperature, such as room temperature. In some embodiments, the digestion incubation temperature is controlled by a water bath. In some embodiments, the digestion incubation temperature is controlled by a heat block. In some embodiments, the digestion incubation temperature is controlled by a thermocycler, e.g., a thermocycler with a lid temperature control element. As described herein, in some embodiments, control of sample temperature when performed using a thermocycler is via a temperature block element. In some embodiments, temperature changes prior to and/or after the digestion incubation time temperature are controlled by a technique described herein, such as cooling at room temperature or a ramp rate.

[0809] In some embodiments, the proteolytic digestion technique comprises subjecting a sample, or a derivative thereof, e.g., an alkylated sample (including an alkylated sample quenched with a neutralizing agent), to a thermal cycle. In some embodiments, the thermal cycle comprises subjecting the sample, or a derivative thereof, to one or more of: (a) a block starting temperature (b) block set temperature (the temperature for the digestion incubation time); (c) a block ending temperature; (d) one or more ramp rates between temperature changes in the thermal cycle (such as between the block starting temperature and the block set temperature or between the block set temperature and the block ending temperature); and (e) a lid temperature relative to the block temperature. In some embodiments, the thermal cycle is performed, in whole or in part, using a thermocycler. In some embodiments, the thermal cycle is configured to reduce and/or prevent loss of sample, such as by escaping vapor and/or condensation when the sample container is opened. In some embodiments, the thermal cycle comprises a set block temperature of about 20° C. to about 50° C., including about any of 22° C., 24° C., 26° C., 28° C., 30° C., 31° C., 32° C., 33° C., 34° C., 35° C., 36° C., 37° C., 38° C., 39° C., 40° C., 42° C., 44° C., 46° C., 48° C.

[0810] In some embodiments, the thermal cycle comprises: (a) a set block temperature of about 20° C. to about 50° C., including about any of 22° C., 24° C., 26° C., 28° C., 30° C., 31° C., 32° C., 33° C., 34° C., 35° C., 36° C., 37° C., 38° C., 39° C., 40° C., 42° C., 44° C., 46° C., 48° C., and (b) a block ending temperature of about 15° C. to about 35° C., such as any of about 20° C. to about 35° C., or about 20° C. to about 25° C. In some embodiments, the thermal cycle comprises: (a) starting block temperature of about 15° C. to about 35° C., such as any of about 20° C. to about 35° C., or about 20° C. to about 25° C., (b) a set block temperature of about 20° C. to about 50° C., including about any of 22° C., 24° C., 26° C., 28° C., 30° C., 31° C., 32° C., 33° C., 34° C., 35° C., 36° C., 37° C., 38° C., 39° C., 40° C., 42° C., 44° C., 46° C., 48° C., and (c) a block ending temperature of about 15° C. to about 35° C., such as any of about 20° C. to about 35° C., or about 20° C. to about 25° C. In any of the thermal cycles described herein, in some embodiments, the lid temperature during the thermal cycle is configured to reduce and/or inhibit condensate formation near or on the lid of a sample container. In some embodiments, the lid temperature during the thermal cycle is at least about 2° C., such as at least about any of 2.5° C., 3° C., 3.5° C., 4° C., 4.5° C., 5° C., 5.5° C., 6° C., 6.5° C., 7° C., 7.5° C., 8° C., 8.5° C., 9° C., 9.5° C., 10° C., 11° C., 12° C., 13° C., 14° C., 15° C., 16° C., 17° C., 18° C., 19° C., or 20° C., higher than the respective temperature of the block during the thermal cycle. In some embodiments, the lid temperature during at least a portion of a thermal cycle is about 102° C. to about 120° C., such as about any of 103° C., 104° C., 105° C., 106° C., 107° C., 108° C., 109° C., or 110° C.

[0811] In some embodiments, the ramp rate between a temperature change in a thermal cycle (such as between a block starting temperature and a block set temperature and/or between a block set temperature a the block ending temperature) is about 1° C./second to about 10° C./second, such as any of 1° C./second, 1.5° C./second, 2° C./second, 2.5° C./second, 3° C./second, 3.5° C./second, 4° C./second, 4.5° C./second, 5° C./second, 5.5° C./second, 6° C./second, 6.5° C./second, 7° C./second, 7.5° C./second, 8° C./second, 8.5° C./second, 9° C./second, 9.5° C./second, or 10° C./second.

[0812] In some embodiments, the proteolytic digestion technique further comprises quenching the one or more proteolytic enzymes. In some embodiments, quenching the one or more proteolytic enzymes comprises denaturing the one or more proteolytic enzymes. In some embodiments, quenching the one or more proteolytic enzymes comprise adding an amount of an acid. In some embodiments, the acid is formic acid (FA) or trifluoroacetic acid (TFA), or a mixture thereof. In some embodiments, the amount (as assessed based on the final concentration in the sample containing solution) of the acid added is about any of 0.1% v/v, 0.2% v/v, 0.3% v/v, 0.4% v/v, 0.5% v/v, 0.6% v/v, 0.7% v/v, 0.8% v/v, 0.9% v/v, 1% v/v, 1.1% v/v, 1.2% v/v, 1.3% v/v, 1.4% v/v, 1.5% v/v, 1.6% v/v, 1.7% v/v, 1.8% v/v, 1.9% v/v, or 2% v/v.

### V. Additional Techniques

[0813] In certain aspects, the method provided herein comprise subjecting the proteolytic digest sample comprising a proteolytic glycopeptide to one or more additional steps prior to subjecting the proteolytic digested sample, or a derivative thereof, to a liquid chromatography-mass spectrometry (LC-MS) technique using a liquid chromatography system and a mass spectrometer. In some embodiments, the LC system is online with the MS (i.e., eluate from the LC system is directly introduced to the MS).

[0814] In some embodiments, the method further comprises adding a standard to the proteolytic digest sample prior to the LC-MS technique. In some embodiments, the standard is a stable isotope-internal standard (SI-IS) peptide mixture.

[0815] In some embodiments, the biological sample is not subjected to a high-abundant protein depletion technique prior to the thermal denaturation technique. For example, in some embodiments, the high-abundant protein depletion technique removes highly abundant proteins present in a blood sample, such as serum albumin.

### E5. Methods for Performing a LC-MS Analysis of a Proteolytic Glycopeptide

[0816] In certain aspects, provided herein is a method for performing a LC-MS analysis on a sample comprising a proteolytic glycopeptide. In some embodiments, the liquid chromatography (LC) system is online with a mass spectrometer (i.e., proteolytic peptide species, including glycopeptides, are eluted from the LC system directing into the mass spectrometer via a mass spectrometer interface. In some embodiments, the LC technique comprises performing a chromatographic separation of one or more proteolytic peptides, including glycopeptides. In some embodiments, the one or more proteolytic peptides subjected to a chromatographic separation are obtained from a proteolytic digest sample, such as described herein.

[0817] In some embodiments, the chromatographic separation comprises a gradient separation performing using mixtures of an aqueous mobile phase and an organic mobile phase. In some embodiments, the chromatographic separation comprises isocratic period, such as a period of at least about 90%, such as at least about any of 91%, 92%, 93%, 94%, 95%, 96%, 97%, 98%, 99%, or 100%, of an aqueous mobile phase to produce the initial eluate that is diverted from the mass spectrometer interface.

[0818] In some embodiments, the LC system comprises a reversed-phase chromatography column. In some embodiments, the reversed-phase column comprises an alkyl moiety, such as C18.

[0819] The present application contemplates a diverse array of additional features of LC-MS techniques for analyzing a sample comprising a glycopeptide using a mass spectrometer. In some embodiments, the liquid chromatography system comprises a high performance liquid chromatography system. In some embodiments, the liquid chromatography system comprises an ultra-high performance liquid chromatography system. In some embodiments, the liquid chromatography system comprises a high-flow liquid chromatography system. In some embodiments, the liquid chromatography system comprises a low-flow liquid chromatography system, such as a micro-flow liquid chromatography system or a nano-flow liquid chromatography system. In some embodiments, the liquid chromatography system is coupled, such as directly interfaced, with a mass spectrometer.

[0820] In some embodiment, the mass spectrometry technique comprises an ionization technique. Ionization techniques contemplated by the present application include techniques capable of charging polypeptides and peptide products, including glycopeptides. Thus, in some embodiments, the ionization technique is electrospray ionization. In some embodiments, the ionization technique is nano-electrospray ionization. In some embodiments, the ionization technique is atmospheric pressure chemical ionization. In some embodiments, the ionization technique is atmospheric pressure photoionization.

[0821] A diverse array of mass spectrometers are contemplated as compatible with the description, include high-resolution mass spectrometers and low-resolution mass spectrometers. In some embodiments, the mass spectrometer is a time-of-flight (TOF) mass spectrometer. In some embodiments, the mass spectrometer is a quadrupole time-of-flight (Q-TOF) mass spectrometer. In some embodiments, the mass spectrometer is a quadrupole ion trap time-of-flight (QIT-TOF) mass spectrometer. In some embodiments, the mass spectrometer is an ion trap. In some embodiments, the mass spectrometer is a single quadrupole. In some embodiments, the mass spectrometer is a triple quadrupole (QQQ). In some embodiments, the mass spectrometer is an orbitrap. In some embodiments, the mass spectrometer is a quadrupole orbitrap. In some embodiments, the mass spectrometer is a fourier transform ion cyclotron resonance (FT) mass spectrometer. In some embodiments, the mass spectrometer is a quadrupole fourier transform ion cyclotron resonance (Q-FT) mass spectrometer. In some embodiments, the mass spectrometry technique comprises positive ion mode. In some embodiments, the mass spectrometry technique comprises negative ion mode. In some embodiments, the mass spectrometry technique comprises an ion mobility mass spectrometry technique.

[0822] In some embodiments, the LC-MS technique comprises processing obtained signals MS from the mass spectrometer. In some embodiments, the LC-MS technique comprises peak detection. In some embodiments, the LC-MS technique comprises determining ionization intensity of an ionized peptide product. In some embodiments, the LC-MS technique comprises determining peak height of an ionized peptide product. In some embodiments, the LC-MS technique comprises determining peak area of an ionized peptide product. In some embodiments, the LC-MS technique comprises determining peak volume of an ionized peptide product. In some embodiments, the LC-MS technique comprises identifying an ionized peptide product by amino acid sequence. In some embodiments, the LC-MS technique comprises determining the site of a post-translational modification of an ionized peptide, such as the site of a glycosylation. In some embodiments, the LC-MS technique comprises determining the glycan structure, or a characteristic thereof, of an ionized peptide product. In some embodiments, the LC-MS technique comprises manually validating the ionized peptide product acid sequence assignments. In some embodiments, the LC-MS technique comprises a quantification technique.

### F5. Exemplary Methods

[0823] In certain aspects, provided is a method for processing a proteolytic digest sample for use in a LC-MS analysis, wherein the proteolytic digest sample comprises a plurality of proteolytically digested peptides comprising at least one proteolytically digested glycopeptide, the method comprising: (A) loading a HILIC load derived from the proteolytic digest sample to a solid phase extraction column comprising a HILIC medium to associate the at least one proteolytically digested glycopeptide with the HILIC medium, wherein the loading of the HILIC load to the solid phase extraction column is initiated when the HILIC medium is in a dry state; and (B) subjecting the HILIC medium to an elution solution to obtain a HILIC eluate comprising the at least one proteolytically digested glycopeptide. In some embodiments, the dry state of a HILIC medium is characterized by the HILIC medium comprising less than about 5% (v/v), such as less than about any of 4.5% (v/v), 4% (v/v), 3.5% (v/v), 3% (v/v), 2.5% (v/v), 2% (v/v), 1.5% (v/v), 1% (v/v), or 0.5% (v/v), of a liquid at the initiation of the loading of a HILIC load to a solid phase extraction column comprising the HILIC medium. In some embodiments, the HILIC load comprises about 300 μg of the plurality of proteolytically digested peptides. In some embodiments, the HILIC load comprises about 600 μg of the plurality of proteolytically digested peptides. In some embodiments, the HILIC load comprises at least about 80% (v/v) ACN. In some embodiments the HILIC load is 220 μl or less. In some embodiments, the method further comprises performing a wash step following the loading and prior to subjecting the HILIC medium to an elution liquid. In some embodiments, the solid phase extraction column comprises about 2.5 mg to about 3.5 mg, including about 3 mg, of a HILIC medium in a dry state, a bed volume of the HILIC medium in a dry state of about 4 μl to about 6 μl, including about 5 μl, and wherein the HILIC medium comprises silica particles covalently bonded with carbamoyl groups. In some embodiments, the solid phase extraction column is a GlykoPrep Cleanup cartridge (e.g., Product code: GS96-CU; WS0263).

[0824] In certain aspects, provided is a method for processing a proteolytic digest sample for use in a LC-MS analysis, wherein the proteolytic digest sample comprises a plurality of proteolytically digested peptides comprising at least one proteolytically digested glycopeptide, the method comprising: (A) loading a HILIC load derived from the proteolytic digest sample to a solid phase extraction column comprising a HILIC medium to associate the at least one proteolytically digested glycopeptide with the HILIC medium, wherein the HILIC load loaded to the solid phase extraction column has an amount of the plurality of proteolytically digested peptides characterized by one or both of: (i) a ratio of the weight of the plurality of proteolytically digested peptides over the weight of the HILIC medium in the dry state of at least about 0.05; and/or (ii) a ratio of the weight of the plurality of proteolytically digested peptides relative to the bed volume of the HILIC medium in the dry state of at least about 30 μg/μl; and (B) subjecting the HILIC medium to an elution solution to obtain a HILIC eluate comprising the at least one proteolytically digested glycopeptide. In some embodiments, the dry state of a HILIC medium is characterized by the HILIC medium comprising less than about 5% (v/v), such as less than about any of 4.5% (v/v), 4% (v/v), 3.5% (v/v), 3% (v/v), 2.5% (v/v), 2% (v/v), 1.5% (v/v), 1% (v/v), or 0.5% (v/v), of a liquid at the initiation of the loading of a HILIC load to a solid phase extraction column comprising the HILIC medium. In some embodiments, the HILIC load comprises about 300 μg of the plurality of proteolytically digested peptides. In some embodiments, the HILIC load comprises about 600 μg of the plurality of proteolytically digested peptides. In some embodiments, the HILIC load comprises at least about 80% (v/v) ACN. In some embodiments the HILIC load is 220 μl or less. In some embodiments, the method further comprises performing a wash step following the loading and prior to subjecting the HILIC medium to an elution liquid. In some embodiments, the solid phase extraction column comprises about 2.5 mg to about 3.5 mg, including about 3 mg, of a HILIC medium in a dry state, a bed volume of the HILIC medium in a dry state of about 4 μl to about 6 μl, including about 5 μl, and wherein the HILIC medium comprises silica particles covalently bonded with carbamoyl groups. In some embodiments, the solid phase extraction column is a GlykoPrep Cleanup cartridge (e.g., Product code: GS96-CU; WS0263).

[0825] In certain aspects, provided is a method for processing a proteolytic digest sample for use in a LC-MS analysis, wherein the proteolytic digest sample comprises a plurality of proteolytically digested peptides comprising at least one proteolytically digested glycopeptide, the method comprising: (A) loading a HILIC load derived from the proteolytic digest sample to a solid phase extraction column comprising a HILIC medium to associate the at least one proteolytically digested glycopeptide with the HILIC medium, the HILIC load loaded to the solid phase extraction column has a concentration of an organic solvent of at least about 70% (v/v); and (B) subjecting the HILIC medium to an elution solution to obtain a HILIC eluate comprising the at least one proteolytically digested glycopeptide. In some embodiments, the HILIC load comprises a concentration of an organic solvent of at least about 80% (v/v), such as at least about any of 85% (v/v), 90% (v/v), or 95% (v/v). In some embodiments, the organic solvent is ACN. In some embodiments, the HILIC load comprises about 300 μg of the plurality of proteolytically digested peptides. In some embodiments, the HILIC load comprises about 600 μg of the plurality of proteolytically digested peptides. In some embodiments, the HILIC load comprises at least about 80% (v/v) ACN. In some embodiments the HILIC load is 220 μl or less. In some embodiments, the method further comprises performing a wash step following the loading and prior to subjecting the HILIC medium to an elution liquid. In some embodiments, the solid phase extraction column comprises about 2.5 mg to about 3.5 mg, including about 3 mg, of a HILIC medium in a dry state, a bed volume of the HILIC medium in a dry state of about 4 μl to about 6 μl, including about 5 μl, and wherein the HILIC medium comprises silica particles covalently bonded with carbamoyl groups. In some embodiments, the solid phase extraction column is a GlykoPrep Cleanup cartridge (e.g., Product code: GS96-CU; WS0263).

[0826] In certain aspects, provided is a method for processing a proteolytic digest sample for use in a LC-MS analysis, wherein the proteolytic digest sample comprises a plurality of proteolytically digested peptides comprising at least one proteolytically digested glycopeptide, the method comprising: (A) loading a HILIC load derived from the proteolytic digest sample to a solid phase extraction column comprising a HILIC medium to associate the at least one proteolytically digested glycopeptide with the HILIC medium, wherein (1) the loading of the HILIC load to the solid phase extraction column is initiated when the HILIC medium is in a dry state; and (2) wherein the HILIC load loaded to the solid phase extraction column has an amount of the plurality of proteolytically digested peptides characterized by one or both of: (i) a ratio of the weight of the plurality of proteolytically digested peptides over the weight of the HILIC medium in the dry state of at least about 0.05; and/or (ii) a ratio of the weight of the plurality of proteolytically digested peptides relative to the bed volume of the HILIC medium in the dry state of at least about 30 μg/μl; and (B) subjecting the HILIC medium to an elution solution to obtain a HILIC eluate comprising the at least one proteolytically digested glycopeptide. In some embodiments, the dry state of a HILIC medium is characterized by the HILIC medium comprising less than about 5% (v/v), such as less than about any of 4.5% (v/v), 4% (v/v), 3.5% (v/v), 3% (v/v), 2.5% (v/v), 2% (v/v), 1.5% (v/v), 1% (v/v), or 0.5% (v/v), of a liquid at the initiation of the loading of a HILIC load to a solid phase extraction column comprising the HILIC medium. In some embodiments, the HILIC load comprises about 300 μg of the plurality of proteolytically digested peptides. In some embodiments, the HILIC load comprises about 600 μg of the plurality of proteolytically digested peptides. In some embodiments, the HILIC load comprises at least about 80% (v/v) ACN. In some embodiments the HILIC load is 220 μl or less. In some embodiments, the method further comprises performing a wash step following the loading and prior to subjecting the HILIC medium to an elution liquid. In some embodiments, the solid phase extraction column comprises about 2.5 mg to about 3.5 mg, including about 3 mg, of a HILIC medium in a dry state, a bed volume of the HILIC medium in a dry state of about 4 μl to about 6 μl, including about 5 μl, and wherein the HILIC medium comprises silica particles covalently bonded with carbamoyl groups. In some embodiments, the solid phase extraction column is a GlykoPrep Cleanup cartridge (e.g., Product code: GS96-CU; WS0263).

[0827] In certain aspects, provided is a method for processing a proteolytic digest sample for use in a liquid chromatography-mass spectrometry (LC-MS) analysis, wherein the proteolytic digest sample comprises a plurality of proteolytically digested peptides comprising at least one proteolytically digested glycopeptide, the method comprising: (A) loading a hydrophilic interaction liquid chromatography (HILIC) load derived from the proteolytic digest sample to a solid phase extraction column comprising a HILIC medium to associate the at least one proteolytically digested glycopeptide with the HILIC medium, wherein the loading of the HILIC load to the solid phase extraction column is initiated when the HILIC medium is in a dry state, and wherein the HILIC load loaded to the solid phase extraction column has a concentration of an organic solvent of at least about 70% (v/v); and (B) subjecting the HILIC medium to an elution solution to obtain a HILIC eluate comprising the at least one proteolytically digested glycopeptide. In some embodiments, the dry state of a HILIC medium is characterized by the HILIC medium comprising less than about 5% (v/v), such as less than about any of 4.5% (v/v), 4% (v/v), 3.5% (v/v), 3% (v/v), 2.5% (v/v), 2% (v/v), 1.5% (v/v), 1% (v/v), or 0.5% (v/v), of a liquid at the initiation of the loading of a HILIC load to a solid phase extraction column comprising the HILIC medium. In some embodiments, the HILIC load comprises a concentration of an organic solvent of at least about 80% (v/v), such as at least about any of 85% (v/v), 90% (v/v), or 95% (v/v). In some embodiments, the organic solvent is ACN. In some embodiments, the HILIC load comprises about 300 μg of the plurality of proteolytically digested peptides. In some embodiments, the HILIC load comprises about 600 μg of the plurality of proteolytically digested peptides. In some embodiments, the HILIC load comprises at least about 80% (v/v) ACN. In some embodiments the HILIC load is 220 μl or less. In some embodiments, the method further comprises performing a wash step following the loading and prior to subjecting the HILIC medium to an elution liquid. In some embodiments, the solid phase extraction column comprises about 2.5 mg to about 3.5 mg, including about 3 mg, of a HILIC medium in a dry state, a bed volume of the HILIC medium in a dry state of about 4 μl to about 6 μl, including about 5 μl, and wherein the HILIC medium comprises silica particles covalently bonded with carbamoyl groups. In some embodiments, the solid phase extraction column is a GlykoPrep Cleanup cartridge (e.g., Product code: GS96-CU; WS0263).

[0828] In certain aspects, provided is a method for processing a proteolytic digest sample for use in a LC-MS analysis, wherein the proteolytic digest sample comprises a plurality of proteolytically digested peptides comprising at least one proteolytically digested glycopeptide, the method comprising: (A) loading a HILIC load derived from the proteolytic digest sample to a solid phase extraction column comprising a HILIC medium to associate the at least one proteolytically digested glycopeptide with the HILIC medium, wherein (1) the HILIC load loaded to the solid phase extraction column has an amount of the plurality of proteolytically digested peptides characterized by one or both of: (i) a ratio of the weight of the plurality of proteolytically digested peptides over the weight of the HILIC medium in the dry state of at least about 0.05; and/or (ii) a ratio of the weight of the plurality of proteolytically digested peptides relative to the bed volume of the HILIC medium in the dry state of at least about 30 μg/μl; and (2) the HILIC load loaded to the solid phase extraction column has a concentration of an organic solvent of at least about 70% (v/v); and (B) subjecting the HILIC medium to an elution solution to obtain a HILIC eluate comprising the at least one proteolytically digested glycopeptide. In some embodiments, the dry state of a HILIC medium is characterized by the HILIC medium comprising less than about 5% (v/v), such as less than about any of 4.5% (v/v), 4% (v/v), 3.5% (v/v), 3% (v/v), 2.5% (v/v), 2% (v/v), 1.5% (v/v), 1% (v/v), or 0.5% (v/v), of a liquid at the initiation of the loading of a HILIC load to a solid phase extraction column comprising the HILIC medium. In some embodiments, the HILIC load comprises about 300 μg of the plurality of proteolytically digested peptides. In some embodiments, the HILIC load comprises about 600 μg of the plurality of proteolytically digested peptides. In some embodiments, the HILIC load comprises at least about 80% (v/v) ACN. In some embodiments the HILIC load is 220 μl or less. In some embodiments, the method further comprises performing a wash step following the loading and prior to subjecting the HILIC medium to an elution liquid. In some embodiments, the solid phase extraction column comprises about 2.5 mg to about 3.5 mg, including about 3 mg, of a HILIC medium in a dry state, a bed volume of the HILIC medium in a dry state of about 4 μl to about 6 μl, including about 5 μl, and wherein the HILIC medium comprises silica particles covalently bonded with carbamoyl groups. In some embodiments, the solid phase extraction column is a GlykoPrep Cleanup cartridge (e.g., Product code: GS96-CU; WS0263).

[0829] In certain aspects, provided is a method for processing a proteolytic digest sample for use in a LC-MS analysis, wherein the proteolytic digest sample comprises a plurality of proteolytically digested peptides comprising at least one proteolytically digested glycopeptide, the method comprising: (A) loading a HILIC load derived from the proteolytic digest sample to a solid phase extraction column comprising a HILIC medium to associate the at least one proteolytically digested glycopeptide with the HILIC medium, wherein (1) the loading of the HILIC load to the solid phase extraction column is initiated when the HILIC medium is in a dry state; (2) the HILIC load loaded to the solid phase extraction column has an amount of the plurality of proteolytically digested peptides characterized by one or both of: (i) a ratio of the weight of the plurality of proteolytically digested peptides over the weight of the HILIC medium in the dry state of at least about 0.05; and/or (ii) a ratio of the weight of the plurality of proteolytically digested peptides relative to the bed volume of the HILIC medium in the dry state of at least about 30 μg/μl; and (3) the HILIC load loaded to the solid phase extraction column has a concentration of an organic solvent of at least about 70% (v/v); and (B) subjecting the HILIC medium to an elution solution to obtain a HILIC eluate comprising the at least one proteolytically digested glycopeptide. In some embodiments, the dry state of a HILIC medium is characterized by the HILIC medium comprising less than about 5% (v/v), such as less than about any of 4.5% (v/v), 4% (v/v), 3.5% (v/v), 3% (v/v), 2.5% (v/v), 2% (v/v), 1.5% (v/v), 1% (v/v), or 0.5% (v/v), of a liquid at the initiation of the loading of a HILIC load to a solid phase extraction column comprising the HILIC medium. In some embodiments, the HILIC load comprises about 300 μg of the plurality of proteolytically digested peptides. In some embodiments, the HILIC load comprises about 600 μg of the plurality of proteolytically digested peptides. In some embodiments, the HILIC load comprises at least about 80% (v/v) ACN. In some embodiments the HILIC load is 220 μl or less. In some embodiments, the method further comprises performing a wash step following the loading and prior to subjecting the HILIC medium to an elution liquid. In some embodiments, the solid phase extraction column comprises about 2.5 mg to about 3.5 mg, including about 3 mg, of a HILIC medium in a dry state, a bed volume of the HILIC medium in a dry state of about 4 μl to about 6 μl, including about 5 μl, and wherein the HILIC medium comprises silica particles covalently bonded with carbamoyl groups. In some embodiments, the solid phase extraction column is a GlykoPrep Cleanup cartridge (e.g., Product code: GS96-CU; WS0263).

### G5. Samples and Components Thereof

[0830] The methods provided herein are contemplated to be suitable for analyzing a diverse array of samples, such as biological samples. In some embodiments, the sample is a blood sample, such as a whole blood sample. In some embodiments, the sample is a plasma sample. In some embodiments, the sample is a serum sample. In some embodiments, the sample is a tissue sample. Plasma is a fluid component of blood that is obtained when a clotting-prevention agent is added to whole blood and then the tube is centrifuged to separate the cellular material. The upper lighter colored liquid layer in the tube is removed as plasma. Common anti-coagulant agents are EDTA (ethylenediaminetetraacetic acid), heparin, and citrate. Serum is a fluid obtained when whole blood is allowed to clot in a tube and then centrifuged so that the clotted blood, including red cells, are at the bottom of the collection tube, leaving a straw-colored liquid above the clot. The straw-colored liquid in the tube is removed as serum.

[0831] The methods provided herein are particularly useful for the analysis of biological samples comprising a glycoprotein, such as to generate glycopeptide containing specimens for analysis with a mass spectrometer. The methods provided herein, in some embodiments, enable the analysis of glycopeptides that elute during early or late phases of a reversed-phase chromatographic separation and are typically missed during conventional mass spectrometry approaches. For the situation where a sample contains hydrophilic salts and hydrophilic glycopeptides, it can be challenging to desalt the sample with a C18 solid phase extraction material without removing a significant portion of the hydrophilic glycopeptides that are needed for an analysis of the sample. For example, glycopeptides with an overall hydrophilic character may elute from a reversed-phase material, such as in a desalting column, and are washed away or not introduced to the mass spectrometer during a data acquisition phase of a mass spectrometry technique. In some embodiments, glycopeptides with an overall hydrophobic character may have a high affinity for a reversed-phase material, such as in a desalting column or a chromatography column, and are not properly eluted from a desalting column or during a data acquisition portion of a mass spectrometry technique.

[0832] In some embodiments, the method comprises an upstream sample preparation technique, such as for obtaining plasma or serum from a blood sample, performed prior to methods for proteolytically digesting a sample. In some embodiments, the upstream sample preparation technique comprises a cell lysis step. In some embodiments, the upstream sample preparation technique comprises a filtration step. In some embodiments, the upstream sample preparation technique comprises a dilution step. In some embodiments, the upstream sample preparation technique comprises a protein concentration determination step.

[0833] In some embodiments, the sample is obtained from an individual. In some embodiments, the sample is obtained from a human individual.

### H5. Systems, Kits, and Compositions

[0834] In certain aspects, contemplated herein are systems, kits, and compositions useful for performing the methods described herein. In some embodiments, provided herein is a system, kit, and/or composition useful for performing a proteolytic digestion of a biological sample comprising a glycoprotein as described herein. In some embodiments, provided herein is a system, kit, and/or composition useful for performing a LC-MS analysis of a proteolytic glycopeptide as described herein. In some embodiments, provided herein is a system, kit, and/or composition useful for performing a proteolytic digestion of a biological sample comprising a glycoprotein followed by LC-MS analysis of the proteolytic glycopeptide produced therefrom.

[0835] The present invention is not intended to be limited in scope to the particular disclosed embodiments, which are provided, for example, to illustrate various aspects of the invention. Various modifications to the compositions and methods described will become apparent from the description and teachings herein. Such variations may be practiced without departing from the true scope and spirit of the disclosure and are intended to fall within the scope of the present disclosure.

### Section 6—Fibrinogen-Depletion and Use Thereof in Glycoproteomic Analysis

[0836] Provided herein, in certain aspects, are methods of processing a blood-derived sample obtained from an individual for a mass spectrometry (MS) technique, such as a glycoproteomic MS technique, the methods comprising admixing the blood-derived sample with one or more defibrination factors to promote formation of a fibrin clot, the one or more defibrination factors comprises one or more members selected from the group consisting of: a clotting co-factor; a clotting enzyme; and a clotting activator and/or an exogenous surface aggregation agent. The disclosure taught herein is based, at least in part, on the inventors' unexpected findings that certain processing techniques using defibrination factors, and combinations thereof, enable the production of fibrinogen-depleted samples having advantageous properties for mass spectrometry biomarker analyses, including for glycopeptides. Similar to known advantages of using serum for biomarker analyses, the fibrinogen-depleted samples provided herein represent a less complex biological sample, such as compared to whole blood, plasma, or serum, and thus enable more consistent study of glycopeptides. As described herein, blood-derived samples (e.g., plasma or serum) can be processed using such defibrination factors to obtain a fibrinogen-depleted sample having mass spectrometry compatibility, including with any of protein digestion, sample clean-up (e.g., desalting), chromatography, and mass spectrometry instrumentation. As demonstrated herein, plasma prepared with various anticoagulants can be defibrinated using the methods taught herein resulting in fibrinogen-depleted samples having a lower comparable complexity and improved uniformity thereby improving confidence in downstream mass spectrometry-based biomarker analyses regardless of the initial sample source. Additionally, the inventors' unexpectedly found that mass spectrometry analyses of the fibrinogen-depleted samples produced herein correlated very well with mass spectrometry analyses of serum samples.

[0837] Thus, in some aspects, provided herein is a method of processing a blood-derived sample obtained from an individual for a glycoproteomic mass spectrometry (MS) technique, the method comprising: (a) admixing the blood-derived sample with one or more defibrination factors to promote formation of a fibrin clot, the one or more defibrination factors comprises one or more members selected from the group consisting of: a clotting co-factor; a clotting enzyme; and a clotting activator and/or an exogenous surface aggregation agent; (b) separating the formed fibrin clot from the admixed blood-derived sample to obtain a fibrinogen-depleted sample; and (c) subjecting the fibrinogen-depleted sample to one or more MS preparation techniques to produce a test sample for the glycoproteomic mass spectrometry technique. In some embodiments, the one or more defibrination factors comprises the clotting co-factor. In some embodiments, the clotting co-factor comprises a divalent cation, such as Ca2+ or Mg2+, or a combination thereof. In some embodiments, the one or more defibrination factors comprises the clotting enzyme. In some embodiments, the clotting enzyme is thrombin. In some embodiments, the one or more defibrination factors comprises the clotting activator and/or the exogenous surface aggregation agent. In some embodiments, the clotting activator and/or the exogenous surface aggregation agent is an exogenous surface aggregation agent, such as Kaolin. In some embodiments, the clotting activator and/or the exogenous surface aggregation agent is a clotting activator and exogenous surface aggregation agent, such as silica, e.g., a silica particle.

[0838] In other aspects, provided herein is a method of preparing a plasma sample obtained from an individual for a glycoproteomic mass spectrometry technique, the method comprising: (a) admixing the plasma sample with defibrination factors to promote formation of a fibrin clot, the defibrination factors comprising: a clotting co-factor; a clotting enzyme; and a clotting activator and/or an exogenous surface aggregation agent; (b) separating the formed fibrin clot from the admixed plasma sample to obtain a fibrinogen-depleted sample; and (c) subjecting the fibrinogen-depleted sample to one or more MS preparation techniques to produce a test sample for the glycoproteomic mass spectrometry technique. In some embodiments, after following admixing with the blood-derived sample: the clotting co-factor comprises Ca²⁺ at a concentration of about 5 mM to about 25 mM; the clotting enzyme comprises thrombin at a concentration of about 1 unit/mL to 10 units/mL; and the clotting activator and/or the exogenous surface aggregation agent is in an amount of about 50 μg to about 500 μg per 40 μL of the blood-derived sample.

[0839] In other aspects, provided herein is a method of analyzing a glycopeptide using a mass spectrometry technique, the method comprising subjecting a fibrinogen-depleted sample, or a derivative thereof, such as obtained using the methods provided herein, to the mass spectrometry technique. In some embodiments, the mass spectrometry technique comprises a multiple-reaction-monitoring (MRM) technique, such as a MRM technique targeting a glycopeptide.

[0840] In other aspects, provided herein is a defibrination composition comprising: a clotting co-factor; a clotting enzyme; and a clotting activator and/or an exogenous surface aggregation agent.

[0841] In other aspects, provided herein is a vessel (such as a sample tube) comprising a defibrination composition described herein.

### B6. Example Mass Spectrometry and Sample Preparation Workflow

[0842] For purposes of orientation and illustration of the description herein, provided in this section are example aspects of sample preparation and mass spectrometry workflows (FIGS. 1A-1C) for analyzing the composition of a peptide and/or glycopeptide using a mass spectrometer. Subsequent sections are provided with more details regarding certain inventive features related to methods for processing a proteolytic digest sample derived from a biological sample comprising a glycoprotein, methods of performing a LC-MS analysis of a proteolytic glycopeptide, and mass spectrometry workflows involving any combination of elements thereof.

[0843] FIG. 1A is a schematic of an example workflow 100 for a peptide structure (e.g., including sequence identification) analysis, including of glycopeptides. The workflow 100 may include various operations including, for example, sample collection 102, sample intake 104, sample preparation and mass spectrometry processing 106, and data analysis 108.

[0844] Sample collection 102 may include, for example, obtaining a biological sample 112 from an individual 114. A biological sample 112 may take the form of a specimen obtained via one or more sampling methods. A biological sample 112 may be representative of an individual 114 as a whole or of a specific tissue, cell type, or other category or sub-category of interest. In some embodiments, the biological sample 112 includes a whole blood sample 116 obtained via a blood draw or a blood-derived sample, such as obtained from processing of whole blood, e.g., plasma or serum. In some embodiments, the biological sample 112 includes set of aliquoted samples 118 that include, for example, a serum sample, a plasma sample, a blood cell (e.g., white blood cell (WBC), red blood cell (RBC) sample, another type of sample, or a combination thereof. In some embodiments, the biological sample 112 is a plasma sample from the individual 114. In some embodiments, the biological sample 112 is a serum sample from the individual 114. In some embodiments, the biological sample 112 may include nucleotides (e.g., ssDNA, dsDNA, RNA), organelles, amino acids, peptides, proteins, carbohydrates, glycoproteins, or any combination thereof.

[0845] Sample intake 104 may include one or more various operations such as, for example, aliquoting, labeling, registering, processing, storing, thawing, and/or other types of operations involved with preparing a sample for sample preparation and mass spectrometry processing. As discussed in more detail herein, in certain aspects, provided is processing methodology (and composition and systems useful therewith) for producing a fibrinogen-depleted sample from a biological sample, such as from plasma or serum. Such fibrinogen-depleted samples can then be used in downstream mass spectrometry based sample preparation and processing techniques 106.

[0846] Sample preparation and mass spectrometry processing 106 may include, for example, one or more operations to form set of peptide species 122, such as a proteolytically digested peptide and/or a proteolytically digested glycopeptide. In some embodiments, the sample preparation includes subjecting a biological sample to a proteolytic digestion. Mass spectrometry processing 124 may include, for example, liquid chromatography, introducing species from the sample, and/or derived therefrom, to a mass spectrometer, and data acquisition, such as using a multiple reaction monitoring (MRM) technique. MRM is a mass spectrometry method in which a precursor ion of a particular m/z value, including window thereof, (e.g., peptide analyte) is selected in the first quadrupole (Q1) and transmitted to the second quadrupole (Q2) for fragmentation. The resulting product ions are then transmitted to the third quadrupole (Q3), which detects only product ions with selected predefined m/z values. In some embodiments, the predefined m/z value, including window thereof, selected in the first quadrupole and a predefined m/z value, including window thereof, may be expressed as a MRM transition. Dynamic MRM (dMRM) is a variant of MRM. In dynamic MRM mode, MRM transition lists are scheduled throughout an LC/MS run based on the retention time window for each analyte. In this way, analytes are only monitored while they are eluting from the LC and therefore the MS scan time is not wasted by monitoring the analytes when they are not expected.

[0847] Data analysis 108 may include, for example, peptide structure analysis 126, e.g., determining the amino acid sequence of a peptide, determining a site of a post-translational modification, and/or determining a glycan composition and/or structure. In some embodiments, data analysis 108 also includes output generation 110. In some embodiments, output generation 110 may be considered a separate operation from data analysis 108. Output generation 110 may include, for example, generating final output 128 based on the results of peptide structure analysis 126. In some embodiments, the final output 128 may be used for one or more downstream purposes, such as research, diagnosis, and/or treatment, and may be sent to a remote system 130.

[0848] In certain aspects, the workflow 100 may optionally exclude one or more of the operations described herein and/or may optionally include one or more other steps or operations other than those described herein (e.g., in addition to and/or instead of those described herein).

[0849] FIG. 1B is a schematic of an example workflow 200 for certain sample preparation techniques 106, some of which may be optionally used in methods provided herein, including proteolytic digestion techniques to produce a proteolytic digest sample. In some embodiments, the workflow 200 comprises a denaturation step 202, such as to unfold and/or linearize a polypeptide to expose one or more cleavage sites. In some embodiments, the workflow 200 comprises a reduction step 202, such as to cleave disulfide bonds. In some embodiments, the workflow 200 comprises an alkylation technique 204, such as to modify cysteine residues to prevent reformation of a disulfide bond. In some embodiments, the workflow 200 comprises a proteolytic digestion technique 206, such as to produce proteolytically digested peptides, including proteolytically digested glycopeptides. Box 205 can represent the R group of an amino acid such as, for example, an R group of arginine or lysine that typically will direct a tryptic cleavage. In some embodiments, the workflow 200 may comprise a post-digestion procedure 207, such as any one or more of a desalting technique, addition of a standard, aliquoting, and/or preparation for a mass spectrometry analysis.

[0850] FIG. 1C is a schematic of an example workflow for certain mass spectrometry processing techniques 106, some of which may be optionally used in methods provided herein. In some embodiments, the workflow comprises a quantification technique 208 using a mass spectrometer, such as a liquid chromatography-mass spectrometry system. In some embodiments, the workflow comprises a quality control technique 210 configured to optimize data quality. In some embodiments, measures can be put in place allowing only errors within acceptable ranges outside of an expected value. In some embodiments, employing statistical models (e.g., using Westgard rules) can assist in quality control 210. For example, quality control 210 may include, for example, assessing the retention time and abundance of representative peptide species (e.g., glycosylated and/or aglycosylated peptide species) and spiked-in internal standards, in either every sample, or in each quality control sample (e.g., pooled serum digest). In some embodiments, the workflow comprises a peak integration and normalization technique 212 to process the data that has been generated and transform the data into a format for analysis. For example, peak integration and normalization 212 may include converting abundance data for various productions that were detected for a selected peptide species into a single quantification metric (e.g., a relative quantity, an adjusted quantity, a normalized quantity, a relative concentration, an adjusted concentration, or a normalized concentration) for that peptide structure. In some embodiments, peak integration and normalization 212 may be performed using one or more of the techniques described in U.S. Patent Publication No. 2020/0372973A1 and/or US Patent Publication No. 2020/0240996A1, the disclosures of which are hereby incorporated herein by reference in their entireties.

### C6. Fibrinogen Depletion

[0851] Provided herein, in certain aspects, are methods of processing a blood-derived sample obtained from an individual to obtain a fibrinogen-depleted sample, wherein the processing comprises admixing the blood-derived sample with one or more defibrination factors. As described herein, the produced fibrinogen-depleted samples are suitable for downstream mass spectrometry sample processing, such as proteolytic digestion, and mass spectrometry analyses, including LC-MS ESI. In some embodiments, reference to a derivative of a fibrinogen-depleted sample reflects that certain additional processing steps have been performed, such as a proteolytic digestion.

[0852] In some embodiments, provided is a method of processing a blood-derived sample obtained from an individual for a glycoproteomic mass spectrometry (MS) technique, the method comprising: (a) admixing the blood-derived sample with one or more defibrination factors to promote formation of a fibrin clot, the one or more defibrination factors comprises one or more members selected from the group consisting of: a clotting co-factor; a clotting enzyme; and a clotting activator and/or an exogenous surface aggregation agent; (b) separating the formed fibrin clot from the admixed blood-derived sample to obtain a fibrinogen-depleted sample; and (c) subjecting the fibrinogen-depleted sample to one or more MS preparation techniques to produce a test sample for the glycoproteomic mass spectrometry technique. In some embodiments, the one or more defibrination factors comprise the clotting co-factor and the clotting enzyme. In some embodiments, the one or more defibrination factors comprise the clotting co-factor and the clotting activator and/or the exogenous surface aggregation agent. In some embodiments, the one or more defibrination factors comprise the clotting enzyme and the clotting activator and/or the exogenous surface aggregation agent. In some embodiments, the one or more defibrination factors comprise the clotting co-factor, the clotting enzyme, and the clotting activator and/or the exogenous surface aggregation agent.

[0853] In some embodiments, provided is a method of processing a blood-derived sample obtained from an individual for a glycoproteomic mass spectrometry (MS) technique, the method comprising: (a) admixing the blood-derived sample with one or more defibrination factors to promote formation of a fibrin clot, the one or more defibrination factors consist essentially of one or more members selected from the group consisting of: a clotting co-factor; a clotting enzyme; and a clotting activator and/or an exogenous surface aggregation agent; (b) separating the formed fibrin clot from the admixed blood-derived sample to obtain a fibrinogen-depleted sample; and (c) subjecting the fibrinogen-depleted sample to one or more MS preparation techniques to produce a test sample for the glycoproteomic mass spectrometry technique. In some embodiments, the one or more defibrination factors comprise the clotting co-factor and the clotting enzyme. In some embodiments, the one or more defibrination factors comprise the clotting co-factor and the clotting activator and/or the exogenous surface aggregation agent. In some embodiments, the one or more defibrination factors comprise the clotting enzyme and the clotting activator and/or the exogenous surface aggregation agent. In some embodiments, the one or more defibrination factors comprise the clotting co-factor, the clotting enzyme, and the clotting activator and/or the exogenous surface aggregation agent.

[0854] In some embodiments, the one or more defibrination factors comprises a clotting co-factor. In some embodiments, the clotting factor comprises a monovalent cation or a divalent cation, or any combination thereof. In some embodiments, the clotting factor comprises a monovalent cation. In some embodiments, the monovalent cation is K⁺ or Na⁺, or any combination thereof. In some embodiments, the clotting co-factor comprises a divalent cation. In some embodiments, the divalent cation is Ca²⁺, Mg²⁺, Zn²⁺, or Cu²⁺, or any combination thereof. In some embodiments, the divalent cation is Ca²⁺. In some embodiments, the clotting co-factor, or source thereof, is calcium chloride, calcium acetate, calcium carbonate, calcium citrate, or calcium gluconate, or any combination thereof.

[0855] The clotting co-factors described herein may be added in a range of concentrations, such as to obtain a desired final concentration. In some embodiments, following admixing with a blood-derived sample, the clotting co-factor (such as a divalent cation) has a concentration of about 5 mM to about 25 mM, such as any of about 5 mM to about 20 mM, about 10 mM to about 20 mM, about 5 mM to about 15 mM, about 10 mM to about 20 mM, or about 15 mM to about 25 mM. In some embodiments, following admixing with a blood-derived sample, the clotting co-factor (such as a divalent cation) has a concentration of at least about 5 mM, such as at least about any of 6 mM, 7 mM, 8 mM, 9 mM, 10 mM, 11 mM, 12 mM, 13 mM, 14 mM, 15 mM, 16 mM, 17 mM, 18 mM, 19 mM, 20 mM, 21 mM, 22 mM, 23 mM, 24 mM, or 25 mM. In some embodiments, following admixing with a blood-derived sample, the clotting co-factor (such as a divalent cation) has a concentration of about any of 5 mM, 6 mM, 7 mM, 8 mM, 9 mM, 10 mM, 11 mM, 12 mM, 13 mM, 14 mM, 15 mM, 16 mM, 17 mM, 18 mM, 19 mM, 20 mM, 21 mM, 22 mM, 23 mM, 24 mM, or 25 mM. In some embodiments, following admixing with a blood-derived sample, the clotting co-factor (such as a monovalent cation) has a concentration of about 0.2 M to about 0.5 M, including about any of 0.2 M, 0.25 M, 0.3 M, 0.35 M, 0.4 M, 0.45 M, or 0.5 M. As described herein, in some embodiments the concentration of a clotting co-factor is based on a final desired concentration (such as after the one or more defibrination factors are admixed with a blood-derived sample), and any amounts, concentrations, and forms of the clotting co-factor added are encompassed by the disclosure provided herein, e.g., a stock composition such as a stock solution comprising the clotting co-factor.

[0856] In some embodiments, the one or more defibrination factors comprises a clotting enzyme. In some embodiments, clotting enzymes are known in active and zymogen forms. In some embodiments, the clotting enzyme is in an active form. In some embodiments, the clotting enzyme is thrombin. In some embodiments, the clotting enzyme is thrombin in an active form, namely, the thrombin can catalyze the conversion of fibrinogen to fibrin. Thrombin that is useful to the disclosure provided herein may come in many forms. For example, in some embodiments, the clotting enzyme is thrombin isolated from an organism, such as thrombin isolated from an individual, including a human or a non-human animal. In some embodiments, the clotting enzyme is a recombinant thrombin.

[0857] The clotting enzymes described herein may be added in a range of concentrations, such as to obtain a desired final concentration or unit based on enzymatic activity (e.g., μmol substrate converted per minute). In some embodiments, following admixing with a blood-derived sample, the clotting enzyme is present in an amount of about 1 unit/mL to about 10 units/mL, such as any of about 3 units/mL to about 7 units/mL, about 1 unit/mL to about 3 units/mL, or about 4 units/mL to about 6 units/mL. In some embodiments, following admixing with a blood-derived sample, the clotting enzyme is present in an amount of at least about 0.5 units/mL, such as at least about 1 unit/mL, 1.5 units/mL, 2 units/mL, 2.5 units/mL, 3 units/mL, 3.5 units/mL, 4 units/mL, 4.5 units/mL, 5 units/mL, 5.5 units/mL, 6 units/mL, 6.5 units/mL, 7 units/mL, 7.5 units/mL, 8 units/mL, 8.5 units/mL, 9 units/mL, 9.5 units/mL, or 10 units/mL. In some embodiments, following admixing with a blood-derived sample, the clotting enzyme is present in an amount of about any of 0.5 units/mL, 1 unit/mL, 1.5 units/mL, 2 units/mL, 2.5 units/mL, 3 units/mL, 3.5 units/mL, 4 units/mL, 4.5 units/mL, 5 units/mL, 5.5 units/mL, 6 units/mL, 6.5 units/mL, 7 units/mL, 7.5 units/mL, 8 units/mL, 8.5 units/mL, 9 units/mL, 9.5 units/mL, or 10 units/mL. As described herein, in some embodiments the concentration of a clotting enzyme is based on a final desired amount (such as after the one or more defibrination factors are admixed with a blood-derived sample), and any amounts, concentrations, and forms of the clotting enzyme added are encompassed by the disclosure provided herein, e.g., a stock composition such as a stock solution comprising the clotting enzyme.

[0858] In some embodiments, the one or more defibrination factors comprises a clotting activator and/or an exogenous surface aggregation agent. As described herein, in some embodiments, an agent that is admixed as the one or more defibrination can have one or more functions, and the use of two functional descriptors is not intended to require more than one agent. For example, in some embodiments, the one or more defibrination factors comprises an agent that is a clotting activator and an exogenous surface aggregation agent. In some embodiments, the clotting activator and/or the exogenous surface aggregation agent is an exogenous surface aggregation agent. In some embodiments, the exogenous surface aggregation agent comprises Kaolin. Kaolin, also described as Kaolinite, comprises Al₂Si₂O₅(OH)₄. In some embodiments, Kaolin has an average particle size of about 20 μm to about 40 μm, such as any of about 25 μm to about 35 μm, about 20 μm to about 30 μm, or about 30 μm to about 40 μm. In some embodiments, the clotting activator and/or the exogenous surface aggregation agent is a clotting activator and exogenous surface aggregation agent. In some embodiments, the clotting activator and/or the exogenous surface aggregation agent, such as the clotting activator and exogenous surface aggregation agent, comprises a material having pores with an average size of about 2 nm to about 60 nm, such as any of about 2 nm to about 50 nm, about 2 nm to about 20 nm, about 2 nm to about 10 nm, or about 10 nm to about 50 nm. In some embodiments, the clotting activator and/or the exogenous surface aggregation agent, such as the clotting activator and exogenous surface aggregation agent, comprises a material having pores with an average size of about 60 nm or less, such as about any of 55 nm or less, 50 nm or less, 45 nm or less, 40 nm or less, 35 nm or less, 30 nm or less, 25 nm or less, 20 nm or less, 15 nm or less, 10 nm or less, or 5 nm or less. In some embodiments, the clotting activator and/or the exogenous surface aggregation agent, such as the clotting activator and exogenous surface aggregation agent, comprises silica. In some embodiments, the clotting activator and/or the exogenous surface aggregation agent, such as the clotting activator and exogenous surface aggregation agent, comprises a silica particle. In some embodiments, the silica particle has pores with an average size of about 2 nm to about 60 nm, such as any of about 2 nm to about 50 nm, about 2 nm to about 20 nm, about 2 nm to about 10 nm, about 10 nm to about 50 nm, about 8 nm to about 16 nm, or about 10 nm to about 14 nm. In some embodiments, the silica particle has pores with an average size of about 60 nm or less, such as about any of 55 nm or less, 50 nm or less, 45 nm or less, 40 nm or less, 35 nm or less, 30 nm or less, 25 nm or less, 20 nm or less, 15 nm or less, 10 nm or less, or 5 nm or less. In some embodiments, the silica particle has an diameter of about 150 μm or less, such as about any of 140 μm or less, 130 μm or less, 120 μm or less, 110 μm or less, 100 μm or less, 90 μm or less, 80 μm or less, 70 μm or less, 60 μm or less, 50 μm or less, 40 μm or less, 30 μm or less, 20 μm or less, 15 μm or less, or 10 μm or less. In some embodiments, the silica particle has a surface area of about 200 m²/g to about 500 m²/g. In certain embodiments, particle size of components is as measured by dynamic light scattering (DLS).

[0859] The clotting activators and/or the exogenous surface aggregation agents described herein may be added in a range of concentrations, such as to obtain a desired final concentration or characteristic, such as surface area. In some embodiments, the clotting activator and/or the exogenous surface aggregation agent is admixed with the blood-derived sample at an amount of about 50 μg to about 500 μg, such as any of 75 μg, 100 μg, 125 μg, 150 μg, 175 μg, 200 μg, 225 μg, 250 μg, 275 μg, 300 μg, 325 μg, 350 μg, 375 μg, 400 μg, 425 μg, 450 μg, or 475 μg, per 40 μL of the blood-derived sample.

[0860] In some embodiments, the one or more defibrination factors comprise the clotting co-factor (such as Ca²⁺) and the clotting enzyme (such as thrombin), wherein, following admixing with the blood-derived sample, the clotting co-factor has a concentration of about 5 mM to about 25 mM, and wherein, following admixing with the blood-derived sample, the clotting enzyme has a concentration of about 1 unit/mL to 10 units/mL. In some embodiments, the one or more defibrination factors comprise the clotting co-factor (such as Ca²⁺) and the clotting activator and/or the exogenous surface aggregation agent (such as Kaolin or a silica particle), wherein, following admixing with the blood-derived sample, the clotting co-factor has a concentration of about 5 mM to about 25 mM, and wherein the clotting activator and/or the exogenous surface aggregation agent is admixed with the blood-derived sample at an amount of about 50 μg to about 500 μg per 40 μL of the blood-derived sample. In some embodiments, the one or more defibrination factors comprise the clotting enzyme (such as thrombin) and the clotting activator and/or the exogenous surface aggregation agent (such as Kaolin or a silica particle), wherein, following admixing with the blood-derived sample, the clotting enzyme has a concentration of about 1 unit/mL to 10 units/mL, and wherein the clotting activator and/or the exogenous surface aggregation agent is admixed with the blood-derived sample at an amount of about 50 μg to about 500 μg per 40 μL of the blood-derived sample. In some embodiments, the one or more defibrination factors comprise the clotting co-factor (such as Ca²⁺), the clotting enzyme (such as thrombin), and the clotting activator and/or the exogenous surface aggregation agent (such as Kaolin or a silica particle), wherein, following admixing with the blood-derived sample, the clotting co-factor has a concentration of about 5 mM to about 25 mM, wherein, following admixing with the blood-derived sample, the clotting enzyme has a concentration of about 1 unit/mL to 10 units/mL, and wherein the clotting activator and/or the exogenous surface aggregation agent is admixed with the blood-derived sample at an amount of about 50 μg to about 500 μg per 40 μL of the blood-derived sample.

[0861] The present disclosure encompasses the various manners in which the one or more defibrination factors is admixed with the blood-derived sample. For example, in some embodiments, when more than one defibrination factor is admixed with the blood-derived sample sequentially. In some embodiments, when more than one defibrination factor is admixed with the blood-derived sample simultaneously. In some embodiments, at least one of the one or more defibrination factors is added to a vessel containing the blood-derived sample. In some embodiments, the blood-derived sample is added to a vessel containing at least one of the one or more defibrination factors.

[0862] The methods provided herein include, in certain embodiments, incubation periods following contact of one or more defibrination factors with a blood-derived sample. Incubation periods may be assessed by determining/monitoring the rate and/or degree of fibrin formation (including by measuring the amount of fibrinogen not converted to fibrin using the methods described herein). In some embodiments, the incubation period is about 1 minute to about 30 minutes. In some embodiments, the incubation period is at least about 30 seconds, including about any of 30 minutes, 1 hour, 2 hours, 3 hours, 6 hours, 8 hours, 10 hours, 12 hours, or 18 hours.

[0863] The method provided herein, in certain aspects, include a step of separating a formed fibrin clot to obtain a fibrinogen-depleted sample. In some embodiments, the separating the formed fibrin clot to obtain the fibrinogen-depleted sample comprises subjecting the admixed blood-derived sample with the one or more defibrination factors to a centrifugation technique and/or a filtration technique. In some embodiments, the separating comprises a centrifugation technique. The centrifugation techniques encompassed herein are suitable for pelleting a fibrin clot formed in the taught methods while substantially maintaining desired polypeptide content in a formed supernatant, such as a desired glycopeptide biomarker. In some embodiments, the centrifugation technique comprises centrifugation at from 1,500 G to 2,500 G. In some embodiments, the centrifugation technique comprises centrifugation at 2,000 G. In some embodiments, the centrifugation technique comprises centrifugation from 15 minutes to 45 minutes. In some embodiments, the centrifugation technique comprises centrifugation for 30 minutes. In some embodiments, the centrifugation technique comprises centrifugation at 2,000 G for 30 minutes. In some embodiments, the separating comprises a filtration technique. In some embodiments, the separating comprises subjecting the admixed blood-derived sample with the one or more defibrination factors to a supernatant collection technique (such as following a centrifugation technique). In some embodiments, the separating comprises a manual step, such as pipetting a supernatant. In some embodiments, the separating comprises an automated step, such as involving automation of the steps described herein, e.g., centrifugation, filtration, and supernatant removal.

[0864] In some embodiments, the method provided herein enable the production of a fibrinogen-depleted sample, wherein the fibrinogen-depleted sample is depleted of at least about 80%, such as at least about any of 81%, 82%, 83%, 84%, 85%, 86%, 87%, 88%, 89%, 90%, 91%, 92%, 93%, 94%, 95%, 96%, 97%, 98%, or 99%, of the fibrinogen as compared to a blood-derived sample (such as the starting material to form the fibrinogen-depleted sample) or a reference standard. In some embodiments, the fibrinogen-depleted sample contains 0.005 mg/mL of fibrinogen or less, including about any of 0.001 mg/mL of fibrinogen or less or 0.0005 mg/mL of fibrinogen of less.

[0865] In certain aspects of the methods described herein, a blood-derived sample is processed. As used herein, a blood-derived sample is intended to exclude unprocessed whole blood obtained from an individual, such as a human. In some embodiments, unprocessed whole blood is collected into a tube containing anti-coagulants, and then processed into a blood-derived sample such as plasma. In some embodiments, the blood-derived sample is a plasma sample. In some embodiments, the plasma sample has been treated with, or contains, an anticoagulant. In some embodiments, the plasma sample has been treated with, or contains, any one or more of the following: a citrate, an ACD (anticoagulant citrate dextrose; including any type thereof, such as ACD-A), Streck, EDTA (ethylenediaminetetraacetic acid), Heparin or Li-Heparin, oxalate fluoride, or a citrate phosphate dextrose adenine (CPDA). In some embodiments, the blood-derived sample is a serum sample.

[0866] In certain aspects, provided is a method of preparing a plasma sample obtained from an individual for a glycoproteomic mass spectrometry technique, the method comprising: (a) admixing the plasma sample with defibrination factors to promote formation of a fibrin clot, the defibrination factors comprising: a clotting co-factor; a clotting enzyme; and a clotting activator and/or an exogenous surface aggregation agent; (b) separating the formed fibrin clot from the admixed plasma sample to obtain a fibrinogen-depleted sample; and (c) subjecting the fibrinogen-depleted sample to one or more MS preparation techniques to produce a test sample for the glycoproteomic mass spectrometry technique. In some embodiments, after following admixing with the blood-derived sample: the clotting co-factor comprises Ca²⁺ at a concentration of about 5 mM to about 25 mM (such as 10 mM, 15, mM, or 20 mM); the clotting enzyme comprises thrombin at a concentration of about 1 unit/mL to 10 units/mL (such as 5 units/mL); and the clotting activator and/or the exogenous surface aggregation agent is in an amount of about 50 μg to about 500 μg (such as 100 μg or 200 μg) per 40 μL of the blood-derived sample.

[0867] In certain aspects, provided herein are defibrination compositions comprising one or more of, including all three of: a clotting co-factor; a clotting enzyme; and a clotting activator and/or an exogenous surface aggregation agent. Encompassed in the description herein are various defibrination composition configured to provide one or more defibrination factors at set amounts once admixed with a blood-derived sample. For example, in some embodiments, the defibrination composition comprises components in amounts such that admixing with a set amount of a blood-derived sample (such as 40 μL of plasma or serum), will provide the clotting co-factor comprises Ca²⁺ at a concentration of about 5 mM to about 25 mM (such as 10 mM, 15, mM, or 20 mM); the clotting enzyme comprises thrombin at a concentration of about 1 unit/mL to 10 units/mL (such as 5 units/mL); and the clotting activator and/or the exogenous surface aggregation agent is in an amount of about 50 μg to about 500 μg (such as 100 μg or 200 μg) per 40 μL of the blood-derived sample. Also encompassed are various forms of defibrination compositions, including a dry power, a lyophilized substance, or a solution.

[0868] In certain aspects, provided herein is a vessel (such as a sample tube) comprising a defibrination composition provided herein. A diverse array of vessels are encompassed by the description provided herein. In some embodiments, the vessel is a blood vial. In some embodiments, the vessel is a plasma or serum vial. In some embodiments, the vessel is an Eppendorf tube. In some embodiments, the vessel is a multi-well plate, such as a 96-well plate.

### D6. Methods for Proteolytically Digesting a Fibrinogen-Depleted Sample, or a Derivative Thereof

[0869] In certain aspects, provided herein are methods of proteolytically digesting a fibrinogen-depleted sample, or a derivative thereof, including a fibrinogen-depleted sample comprising a glycoprotein, the methods comprising subjecting the fibrinogen-depleted sample, or the derivative thereof, to a thermal denaturation technique. As described herein, derivative(s) of a fibrinogen-depleted sample is intended to reflect that downstream process(es) may result in modification of the original fibrinogen-depleted sample, and as such additional descriptors are used herein to communicate various actions taken thereon. Proteases are enzymes that cleave polypeptides at, generally, specific cleavage motifs. For example, trypsin is a serine protease that generally cleaves polypeptides at the carboxyl side (C-terminal side) of lysine and arginine residues. A glycan of a glycopeptide may present a steric hindrance to a protease, thereby inhibiting complete protease digestion of a fibrinogen-depleted sample, or a derivative thereof, comprising a glycoprotein. Without being bound to this theory, it is believed that the methods taught herein improve polypeptide unfolding, such as linearization, and provide protease access to cleavage sites thereby providing methods for more complete proteolytic digestion of glycoproteins.

[0870] In some aspects, provided is a method comprising subjecting a fibrinogen-depleted sample, or a derivative thereof, to a thermal denaturation technique to produce a denatured sample.

[0871] In other aspects, provided is a method comprising subjecting a fibrinogen-depleted sample, or a derivative thereof, to a thermal denaturation technique to produce a denatured sample followed by a proteolytic digestion technique to produce a proteolytic digest sample comprising a proteolytic glycopeptide. In some embodiments, the method comprises quenching one or more proteases used in a proteolytic digestion technique prior to a downstream technique, such as LC-MS.

[0872] In other aspects, provided herein is a method comprising: subjecting a fibrinogen-depleted sample, or a derivative thereof, to a thermal denaturation technique to produce a denatured sample; subjecting the denatured sample to a reduction technique to produce a reduced sample; subjecting the reduced sample to an alkylation technique to produce an alkylated sample; and subjecting the alkylated sample to a proteolytic digestion technique to produce a proteolytic digest sample comprising the proteolytic glycopeptide. In some embodiments, the method comprises quenching an alkylating agent used in the alkylation technique prior to subjecting an alkylated sample to a proteolytic digestion technique. In some embodiments, the method comprises quenching one or more proteases used in a proteolytic digestion technique prior to a downstream technique, such as LC-MS.

[0873] In some embodiments, the proteolytic digestion methods described herein produce a proteolytic digestion sample, including one comprising a proteolytic glycopeptide, having a digestion completion rate of at least about 70%, such as at least about any of 75%, 80%, 85%, 90%, 91%, 92%, 93%, 94%, 95%, 96%, 97%, 98%, or 99%. In some embodiments, the proteolytic digestion methods described herein produce a proteolytic digestion sample, including one comprising a proteolytic glycopeptide, wherein the sample volume loss is 10% or less, such as 9% or less, 8% or less, 7% or less, 6% or less, 5% or less, 4% or less, 3% or less, 2% or less, or 1% or less, based on all volumes added in producing the proteolytic digestion sample.

[0874] In the following sections, additional description of the various aspects of the proteolytic digestion techniques is provided. Such description in a modular fashion is not intended to limit the scope of the disclosure, and based on the teachings provided herein one of ordinary skill in the art will readily appreciate that certain modules can be integrated, at least in part. The section heading used herein are for organizational purposes only and are not to be construed as limiting the subject matter described.

### I. Thermal Denaturation Techniques

[0875] In certain aspects, the methods provided herein comprise performing a thermal denaturation technique. Thermal denaturation techniques, generally speaking, change certain polypeptides conformational structures, such as by unfolding and/or linearizing a polypeptide, to enable protease access to cleavage sites. Thermal denaturation techniques described herein comprise subjecting a sample, or a derivative thereof (e.g., a sample diluted with a buffer), to a thermal treatment of about 60° C. to about 100° C. for thermal denaturation incubation time of at least about 1 minute. In some embodiments, the thermal denaturation technique is not performed concurrently with a chemical denaturation technique, such as using high concentrations of denaturing agent, e.g., 6M urea. In some embodiments, the method does not include use of a chemical denaturation technique.

[0876] In some embodiments, the thermal denaturation incubation time is performed at a temperature of about 60° C. to about 100° C., such as any of about 70° C. to about 100° C., about 80° C. to about 100° C., about 90° C. to about 100° C., about 95° C. to about 100° C., or about 85° C. to about 95° C. In some embodiments, the thermal denaturation incubation time is performed at a temperature of at least about 60° C., such as at least about any of 65° C., 70° C., 75° C., 80° C., 85° C., 90° C., 95° C., or 100° C. In some embodiments, the thermal denaturation incubation time is performed at a temperature of about 100° C. or less, such as about any of 95° C. or less, 90° C. or less, 85° C. or less, 80° C. or less, 75° C. or less, 70° C. or less, 65° C. or less, 60° C. or less. In some embodiments, the thermal denaturation incubation time is performed at a temperature of about any of 60° C., 65° C., 70° C., 75° C., 80° C., 85° C., 90° C., 91° C., 92° C., 93° C., 94° C., 95° C., 96° C., 97° C., 98° C., 99° C., or 100° C.

[0877] In some embodiments, the thermal denaturation incubation time is about 1 minute to about 15 minutes, such as any of about 1 minute to about 5 minutes, about 1 minute to about 10 minutes, about 2.5 minutes to about 7.5 minutes, or about 5 minutes to about 15 minutes. In some embodiments, the thermal denaturation incubation time is at least about 1 minute, such as at least about any of 1.5 minutes, 2 minutes, 2.5 minutes, 3 minutes, 3.5 minutes, 4 minutes, 4.5 minutes, 5 minutes, 5.5 minutes, 6 minutes, 6.5 minutes, 7 minutes, 7.5 minutes, 8 minutes, 8.5 minutes, 9 minutes, 9.5 minutes, 10 minutes, 11 minutes, 12 minutes, 13 minutes, 14 minutes, or 15 minutes. In some embodiments, the thermal denaturation incubation time is about 15 minutes or less, such as about any of 14 minutes or less, 13 minutes or less, 12 minutes or less, 11 minutes or less, 10 minutes or less, 9.5 minutes or less, 9 minutes or less, 8.5 minutes or less, 8 minutes or less, 7.5 minutes or less, 7 minutes or less, 6.5 minutes or less, 6 minutes or less, 5.5 minutes or less, 5 minutes or less, 4.5 minutes or less, 4 minutes or less, 3.5 minutes or less, 3 minutes or less, 2.5 minutes or less, 2 minutes or less, 1.5 minutes or less, or 1 minute or less. In some embodiments, the thermal denaturation incubation time is about any of 1 minute, 1.5 minutes, 2 minutes, 2.5 minutes, 3 minutes, 3.5 minutes, 4 minutes, 4.5 minutes, 5 minutes, 5.5 minutes, 6 minutes, 6.5 minutes, 7 minutes, 7.5 minutes, 8 minutes, 8.5 minutes, 9 minutes, 9.5 minutes, 10 minutes, 11 minutes, 12 minutes, 13 minutes, 14 minutes, or 15 minutes.

[0878] In some embodiments, the thermal denaturation technique comprises a thermal denaturation incubation time of about 1 minute to about 15 minutes, such as about any of 1 minute, 2 minutes, 3 minutes, 4 minutes, 5 minutes, 6 minutes, 7 minutes, 8 minutes, 9 minutes 10 minutes, 11 minutes, 12 minutes, 13 minutes, 14 minutes, or 15 minutes, wherein the thermal denaturation incubation is performed at a temperature of about 60° C. to about 100° C., such about any of 60° C., 65° C., 70° C., 75° C., 80° C., 85° C., 90° C., 91° C., 92° C., 93° C., 94° C., 95° C., 96° C., 97° C., 98° C., 99° C., or 100° C.

[0879] The thermal denaturation incubation temperature can be controlled by numerous techniques and combinations thereof. In some embodiments, the thermal denaturation incubation temperature is controlled by a water bath. In some embodiments, the thermal denaturation incubation temperature is controlled by a heat block. In some embodiments, the thermal denaturation incubation temperature is controlled by a thermocycler, e.g., a thermocycler with a lid temperature control element. As described herein, in some embodiments, control of sample temperature when performed using a thermocycler is via a temperature block element. In some embodiments, temperature changes prior to and/or after the thermal denaturation incubation time temperature are controlled by a technique described herein, such as cooling at room temperature or via the thermocycler.

[0880] In some embodiments, the thermal denaturation technique comprises subjecting a sample, or a derivative thereof, e.g., a sample diluted in a buffer, to a thermal cycle. In some embodiments, the thermal cycle comprises subjecting the sample, or a derivative thereof, to one or more of: (a) a block starting temperature (b) block set temperature (the temperature for the thermal denaturation incubation time); (c) a block ending temperature; (d) one or more ramp rates between temperature changes in the thermal cycle (such as between the block starting temperature and the block set temperature or between the block set temperature and the block ending temperature); and (e) a lid temperature relative to the block temperature. In some embodiments, the thermal cycle is performed, in whole or in part, using a thermocycler. In some embodiments, the thermal cycle is configured to reduce and/or prevent loss of sample, such as by escaping vapor and/or condensation when the sample container is opened. In some embodiments, the thermal cycle comprises a set block temperature of about 60° C. to about 100° C., including about any of 60° C., 65° C., 70° C., 75° C., 80° C., 85° C., 90° C., 91° C., 92° C., 93° C., 94° C., 95° C., 96° C., 97° C., 98° C., 99° C., or 100° C. In some embodiments, the thermal cycle comprises: (a) a set block temperature of about 60° C. to about 100° C., including about any of 60° C., 65° C., 70° C., 75° C., 80° C., 85° C., 90° C., 91° C., 92° C., 93° C., 94° C., 95° C., 96° C., 97° C., 98° C., 99° C., or 100° C., and (b) a block ending temperature of about 15° C. to about 35° C., such as any of about 20° C. to about 35° C., or about 20° C. to about 25° C. In some embodiments, the thermal cycle comprises: (a) starting block temperature of about 15° C. to about 50° C., such as any of 15° C. to about 25° C., about 20° C. to about 30° C., or about 20° C. to about 25° C., including about any of 20° C., 21° C., 22° C., 23° C., 24° C., 25° C., (b) a set block temperature of about 60° C. to about 100° C., such about any of 60° C., 65° C., 70° C., 75° C., 80° C., 85° C., 90° C., 91° C., 92° C., 93° C., 94° C., 95° C., 96° C., 97° C., 98° C., 99° C., or 100° C., and (c) a block ending temperature of about 15° C. to about 35° C., such as any of about 20° C. to about 35° C., or about 20° C. to about 25° C. In any of the thermal cycles described herein, in some embodiments, the lid temperature during the thermal cycle is configured to reduce and/or inhibit condensate formation near or on the lid of a sample container. In some embodiments, the lid temperature during the thermal cycle is at least about 2° C., such as at least about any of 2.5° C., 3° C., 3.5° C., 4° C., 4.5° C., 5° C., 5.5° C., 6° C., 6.5° C., 7° C., 7.5° C., 8° C., 8.5° C., 9° C., 9.5° C., 10° C., 11° C., 12° C., 13° C., 14° C., 15° C., 16° C., 17° C., 18° C., 19° C., or 20° C., higher than the respective temperature of the block during the thermal cycle. In some embodiments, the lid temperature during at least a portion of a thermal cycle is about 102° C. to about 120° C., such as about any of 103° C., 104° C., 105° C., 106° C., 107° C., 108° C., 109° C., or 110° C. In some embodiments, the lid temperature during the thermal cycle may be the same respective temperature of the block during the thermal cycle or a temperature greater than the temperature of the block during the thermal cycle. In some embodiments, the lid temperature during the thermal cycle may be the same respective temperature of the block during the thermal cycle or a temperature greater than the temperature of the block during the thermal cycle.

[0881] In some embodiments, the ramp rate between a temperature change in a thermal cycle (such as between a block starting temperature and a block set temperature and/or between a block set temperature a the block ending temperature) is about 1° C./second to about 10° C./second, such as any of 1° C./second, 1.5° C./second, 2° C./second, 2.5° C./second, 3° C./second, 3.5° C./second, 4° C./second, 4.5° C./second, 5° C./second, 5.5° C./second, 6° C./second, 6.5° C./second, 7° C./second, 7.5° C./second, 8° C./second, 8.5° C./second, 9° C./second, 9.5° C./second, or 10° C./second.

[0882] In some embodiments, the method further comprises admixing an amount of a fibrinogen-depleted sample, or a derivative thereof, and a buffer prior to the thermal denaturation technique (e.g., the buffered sample is subjected to a thermal denaturation technique described herein). In some embodiment, the amount (as assessed based on the final concentration in the sample containing solution containing solution) of the buffer is about 1 mM to about 100 mM, such as any of about 20 mM to about 80 mM, about 30 mM to about 70 mM, or about 40 mM to about 60 mM. In some embodiment, the amount of the buffer is about any of 10 mM, 15 mM, 20 mM, 25 mM, 30 mM, 35 mM, 40 mM, 45 mM, 50 mM, 55 mM, 60 mM, 65 mM, 70 mM, 75 mM, 80 mM, 85 mM, 90 mM, 95 mM, or 100 mM. In some embodiments, the buffer is selected from the group consisting of ammonium bicarbonate, ammonium acetate, ammonium formate, triethylammonium bicarbonate, and Tris-HCl, or any combination thereof.

[0883] In some embodiments, the method further comprises determining the protein concentration in a fibrinogen-depleted sample, or a derivative thereof.

### II. Reduction Techniques

[0884] In certain aspects, the methods provided herein comprise performing a reduction technique. In some embodiments, the reduction technique is performed on a sample, or a derivative thereof, following thermal denaturation. Reduction techniques, generally speaking, reduce (e.g., cleave) disulfide linkages between cysteine residues of one or more polypeptides to reduce the presence of polypeptide conformations that inhibit or prevent protease cleavage of the one or more polypeptides. Reduction techniques described herein comprise subjecting a sample, or a derivative thereof (e.g., a denatured sample), to an amount of a reducing agent and incubating for a reducing incubation time performed at a temperature or range thereof.

[0885] In some embodiments, the reducing agent is dithiothreitol (DTT), tris(2-carboxyethyl) phosphine (TCEP), beta-mercaptoethanol (BME), or a cysteine, or any mixture thereof.

[0886] In some embodiments, the amount (as assessed based on the final concentration in the sample containing solution containing solution) of a reducing agent, e.g., DTT, used in a reduction technique is about 1 mM to about 100 mM, such as any of about 1 mM to about 40 mM, about 1 mM to about 30 mM, about 5 mM to about 25 mM, about 10 mM, to about 20 mM, 20 mM to about 80 mM, about 30 mM to about 70 mM, or about 40 mM to about 60 mM. In some embodiments, the amount of reducing agent used in a reduction technique is at least about 1 mM, such as at least about any of 2 mM, 3 mM, 4 mM, 5 mM, 6 mM, 7 mM, 8 mM, 9 mM, 10 mM, 11 mM, 12 mM, 13 mM, 14 mM, 15 mM, 16 mM, 17 mM, 18 mM, 19 mM, 20 mM, 25 mM, 30 mM, 35 mM, 40 mM, 45 mM, 50 mM, 55 mM, 60 mM, 65 mM, 70 mM, 75 mM, 80 mM, 85 mM, 90 mM, 95 mM, or 100 mM. In some embodiments, the amount of reducing agent used in a reduction technique is about 100 mM or less, such as about any of 95 mM or less, 90 mM or less, 85 mM or less, 80 mM or less, 75 mM or less, 70 mM or less, 65 mM or less, 60 mM or less, 55 mM or less, 50 mM or less, 45 mM or less, 40 mM or less, 35 mM or less, 30 mM or less, 25 mM or less, 20 mM or less, 19 or less, 18 or less, 17 or less, 16 or less, 15 or less, 14 or less, 13 or less, 12 or less, 11 or less, 10 or less, 9 or less, 8 or less, 7 or less, 6 or less, 5 or less, 4 or less, 3 or less, 2 or less, or 1 or less. In some embodiments, the amount of reducing agent used in a reduction technique is about any of 1 mM, 2 mM, 3 mM, 4 mM, 5 mM, 6 mM, 7 mM, 8 mM, 9 mM, 10 mM, 11 mM, 12 mM, 13 mM, 14 mM, 15 mM, 16 mM, 17 mM, 18 mM, 19 mM, 20 mM, 25 mM, 30 mM, 35 mM, 40 mM, 45 mM, 50 mM, 55 mM, 60 mM, 65 mM, 70 mM, 75 mM, 80 mM, 85 mM, 90 mM, 95 mM, or 100 mM.

[0887] In some embodiments, the reduction incubation time is about 10 minutes to about 120 minutes, such as any of about 30 minutes to about 60 minutes, about 40 minutes to about 60 minutes, about 45 minutes to about 55 minutes. In some embodiments, the reduction incubation time is at least about 20 minutes, such as at least about any of 25 minutes, 30 minutes, 35 minutes, 40 minutes, 45 minutes, 50 minutes, 55 minutes, 60 minutes, 65 minutes, 70 minutes, 75 minutes, 80 minutes, 85 minutes, 90 minutes, 95 minutes, 100 minutes, 105 minutes, 110 minutes, 115 minutes. In some embodiments, the reduction incubation time is about 120 minutes or less, such as about any of 115 minutes or less, 110 minutes or less, 105 minutes or less, 100 minutes or less, 95 minutes or less, 90 minutes or less, 85 minutes or less, 80 minutes or less, 75 minutes or less, 70 minutes or less, 65 minutes or less, 60 minutes or less, 55 minutes or less, 50 minutes or less, 45 minutes or less, 40 minutes or less, 35 minutes or less, 30 minutes or less, or 25 minutes or less. In some embodiments, the reduction incubation time is about any of 20 minutes, 25 minutes, 30 minutes, 35 minutes, 40 minutes, 45 minutes, 50 minutes, 55 minutes, 60 minutes, 65 minutes, 70 minutes, 75 minutes, 80 minutes, 85 minutes, 90 minutes, 95 minutes, 100 minutes, 105 minutes, 110 minutes, 115 minutes.

[0888] In some embodiments, the reduction incubation time is performed at a temperature of about 20° C. to about 100° C., such as any of about 40° C. to about 80° C., about 50° C. to about 70° C., about 50° C. to about 60° C., about 55° C. to about 65° C., or about 60° C. to about 70° C. In some embodiments, the reduction incubation time is performed at a temperature of at least about 20° C., such as at least about any of 25° C., 30° C., 35° C., 40° C., 45° C., 50° C., 55° C., 60° C., 65° C., 70° C., 75° C., 80° C., 85° C., 90° C., or 95° C. In some embodiments, the reduction incubation time is performed at a temperature of about 95° C. or less, such as about any of 90° C. or less, 85° C. or less, 80° C. or less, 75° C. or less, 70° C. or less, 65° C. or less, 60° C. or less, 55° C. or less, 50° C. or less, 45° C. or less, 40° C. or less, 35° C. or less, 30° C. or less, or 25° C. or less. In some embodiments, the reduction incubation time is performed at a temperature of about any of 20° C., 25° C., 30° C., 35° C., 40° C., 45° C., 50° C., 51° C., 52° C., 53° C., 54° C., 55° C., 56° C., 57° C., 58° C., 59° C., 60° C., 61° C., 62° C., 63° C., 64° C., 65° C., 66° C., 67° C., 68° C., 69° C., 70° C., 75° C., 80° C., 85° C., 90° C., or 95° C. In some embodiments, the reduction incubation time is performed at a room temperature.

[0889] In some embodiments, the reduction technique comprises a reduction incubation time of about 30 minutes to about 70 minutes, such as about any of 35 minutes, 40 minutes, 45 minutes, 50 minutes, 55 minutes, 60 minutes, or 65 minutes, wherein the reduction incubation time is performed at a temperature of about 50° C. to about 70° C., such about any of 55° C., 60° C., or 65° C. In some embodiments, the reduction technique comprises use of an amount (as assessed based on the final concentration in the sample containing solution) of a reducing agent, e.g., DTT, of about 5 mM to about 25 mM, such as any of about 6 mM, 7 mM, 8 mM, 9 mM, 10 mM, 11 mM, 12 mM, 13 mM, 14 mM, 15 mM, 16 mM, 17 mM, 18 mM, 19 mM, 20 mM, 21 mM, 22 mM, 23 mM, or 24 mM, and a reduction incubation time of about 30 minutes to about 70 minutes, such as about any of 35 minutes, 40 minutes, 45 minutes, 50 minutes, 55 minutes, 60 minutes, or 65 minutes, wherein the reduction incubation time is performed at a temperature of about 50° C. to about 70° C., such about any of 55° C., 60° C., or 65° C.

[0890] The reduction incubation temperature can be controlled by numerous techniques and combinations thereof. In some embodiments, the reduction incubation temperature is controlled by an ambient temperature, such as room temperature. In some embodiments, the reduction incubation temperature is controlled by a water bath. In some embodiments, the reduction incubation temperature is controlled by a heat block. In some embodiments, the reduction incubation temperature is controlled by a thermocycler, e.g., a thermocycler with a lid temperature control element. As described herein, in some embodiments, control of sample temperature when performed using a thermocycler is via a temperature block element. In some embodiments, temperature changes prior to and/or after the reduction incubation time temperature are controlled by a technique described herein, such as cooling at room temperature or a ramp rate.

[0891] In some embodiments, the reduction technique comprises subjecting a sample, or a derivative thereof, e.g., a denatured sample, to a thermal cycle. In some embodiments, the thermal cycle comprises subjecting the sample, or a derivative thereof, to one or more of: (a) a block starting temperature (b) block set temperature (the temperature for the reduction incubation time); (c) a block ending temperature; (d) one or more ramp rates between temperature changes in the thermal cycle (such as between the block starting temperature and the block set temperature or between the block set temperature and the block ending temperature); and (e) a lid temperature relative to the block temperature. In some embodiments, the thermal cycle is performed, in whole or in part, using a thermocycler. In some embodiments, the thermal cycle is configured to reduce and/or prevent loss of sample, such as by escaping vapor and/or condensation when the sample container is opened. In some embodiments, the thermal cycle comprises a set block temperature of about 20° C. to about 100° C., such as any of 40° C. to about 80° C., about 50° C. to about 70° C., about 50° C. to about 60° C., about 55° C. to about 65° C., or about 60° C. to about 70° C., including about any of 50° C., 55° C., 60° C., 65° C., or 70° C. In some embodiments, the thermal cycle comprises: (a) a set block temperature of about 20° C. to about 100° C., such as any of about 40° C. to about 80° C., about 50° C. to about 70° C., about 50° C. to about 60° C., about 55° C. to about 65° C., or about 60° C. to about 70° C., including about any of 50° C., 55° C., 60° C., 65° C., or 70° C., and (b) a block ending temperature of about 15° C. to about 35° C., such as any of about 20° C. to about 35° C., or about 20° C. to about 25° C. In some embodiments, the thermal cycle comprises: (a) starting block temperature of about 15° C. to about 60° C., such as any of about 15° C. to about 50° C., about 20° C. to about 40° C., about 20° C. to about 30° C., or about 20° C. to about 25° C., (b) a set block temperature of about 20° C. to about 100° C., such as any of about 40° C. to about 80° C., about 50° C. to about 70° C., about 50° C. to about 60° C., about 55° C. to about 65° C., or about 60° C. to about 70° C., including about any of 50° C., 55° C., 60° C., 65° C., or 70° C., and (c) a block ending temperature of about 15° C. to about 35° C., such as any of about 20° C. to about 35° C., or about 20° C. to about 25° C. In any of the thermal cycles described herein, in some embodiments, the lid temperature during the thermal cycle is configured to reduce and/or inhibit condensate formation near or on the lid of a sample container. In some embodiments, the lid temperature during the thermal cycle is at least about 2° C., such as at least about any of 2.5° C., 3° C., 3.5° C., 4° C., 4.5° C., 5° C., 5.5° C., 6° C., 6.5° C., 7° C., 7.5° C., 8° C., 8.5° C., 9° C., 9.5° C., 10° C., 11° C., 12° C., 13° C., 14° C., 15° C., 16° C., 17° C., 18° C., 19° C., or 20° C., higher than the respective temperature of the block during the thermal cycle. In some embodiments, the lid temperature during at least a portion of a thermal cycle is about 102° C. to about 120° C., such as about any of 103° C., 104° C., 105° C., 106° C., 107° C., 108° C., 109° C., or 110° C.

[0892] In some embodiments, the ramp rate between a temperature change in a thermal cycle (such as between a block starting temperature and a block set temperature and/or between a block set temperature a the block ending temperature) is about 1° C./second to about 10° C./second, such as any of 1° C./second, 1.5° C./second, 2° C./second, 2.5° C./second, 3° C./second, 3.5° C./second, 4° C./second, 4.5° C./second, 5° C./second, 5.5° C./second, 6° C./second, 6.5° C./second, 7° C./second, 7.5° C./second, 8° C./second, 8.5° C./second, 9° C./second, 9.5° C./second, or 10° C./second.

[0893] In some embodiments, the reduction technique described herein is completed simultaneously with a thermal denaturation step. For example, the combined thermal denaturation technique and reduction technique comprises adding a reducing agent to a sample, or a derivative thereof, and then subjecting the sample, or the derivative thereof, to a temperature of about 60° C. to about 100° C., such about any of 60° C., 65° C., 70° C., 75° C., 80° C., 85° C., 90° C., 91° C., 92° C., 93° C., 94° C., 95° C., 96° C., 97° C., 98° C., 99° C., or 100° C., for an incubation time of at least about 1 minute, such as at least about any of 2 minutes, 3 minutes, 4 minutes, 5 minutes, 10 minutes, 15 minutes, 20 minutes, 25 minutes, 30 minutes, 35 minutes, 40 minutes, 45 minutes, 50 minutes, 55 minutes, or 60 minutes. In some embodiments, the combined thermal denaturation technique and reduction technique comprises adding a reducing agent to a sample, or a derivative thereof, and then subjecting the sample, or the derivative thereof, to a temperature of about 90° C. to about 100° C., for an incubation time of about 40 minutes to about 60 minutes, including 50 minutes.

### III. Alkylation Techniques

[0894] In certain aspects, the methods provided herein comprise performing an alkylation technique. In some embodiments, the alkylation technique is performed on a sample, or a derivative thereof, following the performance of a reduction technique. Alkylation techniques, generally speaking, prevent the reformation of one or more disulfide linkages between, e.g., cysteine residues of one or more polypeptides. This is done by, e.g., the addition of an acetamide moiety to the sulfur of a cysteine residue thereby producing an alkylated polypeptide. Alkylation techniques may reduce the presence of polypeptide conformations that inhibit or prevent protease cleavage of the one or more polypeptides. Alkylation techniques described herein comprise subjecting a sample, or a derivative thereof (e.g., a reduced sample), to an amount of an alkylating agent and incubating for an alkylation incubation time performed at a temperature or range thereof. In some embodiments, the method comprises subjecting a denatured sample to a reduction technique followed by an alkylation technique prior to performing a proteolytic digestion technique.

[0895] In some embodiments, the alkylating agent is iodoacetamide (IAA), 2-chloroacetamide, an acetamide salt, or any mixture thereof.

[0896] In some embodiments, the amount (as assessed based on the final concentration in the sample containing solution) of an alkylating agent, e.g., IAA, used in an alkylation technique is about 10 mM to about 100 mM, such as any of about 10 mM to about 50 mM, about 20 mM to about 40 mM, about 20 mM to about 36 mM, about 15 mM to about 25 mM, about 20 mM to about 25 mM, about 20 mM to about 80 mM, about 30 mM to about 70 mM, or about 40 mM to about 60 mM. In some embodiments, the amount of an alkylating agent used in an alkylation technique is at least about 10 mM, such as at least about any of 15 mM, 16 mM, 17 mM, 18 mM, 19 mM, 20 mM, 21 mM, 22 mM, 23 mM, 24 mM, 25 mM, 30 mM, 35 mM, 40 mM, 45 mM, 50 mM, 55 mM, 60 mM, 65 mM, 70 mM, 75 mM, 80 mM, 85 mM, 90 mM, 95 mM, or 100 mM. In some embodiments, the amount of an alkylating agent used in an alkylation technique is about 100 mM or less, such as about any of 95 mM or less, 90 mM or less, 85 mM or less, 80 mM or less, 75 mM or less, 70 mM or less, 65 mM or less, 60 mM or less, 55 mM or less, 50 mM or less, 45 mM or less, 40 mM or less, 35 mM or less, 30 mM or less, 25 mM or less, 24 mM or less, 23 mM or less, 22 mM or less, 21 mM or less, 20 mM or less, 19 mM or less, 18 mM or less, 17 mM or less, 16 mM or less, 15 mM or less, or 10 mM or less. In some embodiments, the amount of an alkylating agent used in an alkylation technique is about any of 10 mM, 15 mM, 20 mM, 20.5 mM, 21 mM, 21.5 mM, 22 mM, 22.5 mM, 23 mM, 23.5 mM, 24 mM, 24.5 mM, 25 mM, 30 mM, 35 mM, 40 mM, 45 mM, 50 mM, 55 mM, 60 mM, 65 mM, 70 mM, 75 mM, 80 mM, 85 mM, 90 mM, 95 mM, or 100 mM.

[0897] In some embodiments, the alkylation incubation time is about 5 minutes to about 60 minutes, such as any of about 10 minutes to about 50 minutes, about 20 minutes to about 40 minutes, about 25 minutes to about 35 minutes. In some embodiments, the alkylation incubation time is at least about 5 minutes, such as at least about any of 10 minutes, 15 minutes, 20 minutes, 25 minutes, 30 minutes, 35 minutes, 40 minutes, 45 minutes, 50 minutes, 55 minutes, or 60 minutes. In some embodiments, the alkylation incubation time is about 60 minutes or less, such as about any of 55 minutes or less, 50 minutes or less, 45 minutes or less, 40 minutes or less, 35 minutes or less, 30 minutes or less, 25 minutes or less, 20 minutes or less, 15 minutes or less, 10 minutes or less, or 5 minutes or less. In some embodiments, the alkylation incubation time is about any of 5 minutes, 10 minutes, 15 minutes, 20 minutes, 25 minutes, 30 minutes, 35 minutes, 40 minutes, 45 minutes, 50 minutes, 55 minutes, or 60 minutes.

[0898] In some embodiments, the alkylation incubation time is performed at a temperature of about 15° C. to about 100° C., such as any of about 15° C. to about 80° C., about 15° C. to about 60° C., about 15° C. to about 35° C., about 20° C. to about 30° C., or about 20° C. to about 25° C. In some embodiments, the alkylation incubation time is performed at a temperature of at least about 15° C., such as at least about any of 20° C., 21° C., 22° C., 23° C., 24° C., 25° C., 30° C., 35° C., 40° C., 45° C., 50° C., 55° C., 60° C., 65° C., 70° C., 75° C., 80° C., 85° C., 90° C., or 95° C. In some embodiments, the alkylation incubation time is performed at a temperature of about 95° C. or less, such as about any of 90° C. or less, 85° C. or less, 80° C. or less, 75° C. or less, 70° C. or less, 65° C. or less, 60° C. or less, 55° C. or less, 50° C. or less, 45° C. or less, 40° C. or less, 35° C. or less, 30° C. or less, 25° C. or less, 24° C. or less, 23° C. or less, 22° C. or less, 21° C. or less, or 20° C. or less. In some embodiments, the alkylation incubation time is performed at a temperature of about any of 15° C., 16° C., 17° C., 18° C., 19° C., 20° C., 21° C., 22° C., 23° C., 24° C., 25° C., 30° C., 35° C., 40° C., 45° C., 50° C., 51° C., 52° C., 53° C., 54° C., 55° C., 56° C., 57° C., 58° C., 59° C., 60° C., 61° C., 62° C., 63° C., 64° C., 65° C., 66° C., 67° C., 68° C., 69° C., 70° C., 75° C., 80° C., 85° C., 90° C., or 95° C. In some embodiments, the alkylation incubation time is performed at a room temperature.

[0899] In some embodiments, the alkylation technique comprises an alkylation incubation time of about 5 minutes to about 60 minutes, such as about any of 15 minutes, 20 minutes, 25 minutes, 30 minutes, 35 minutes, or 40 minutes, wherein the alkylation incubation time is performed at a temperature of about 15° C. to about 30° C., such about any of 20° C., 21° C., 22° C., 23° C., 24° C., 25° C. In some embodiments, the alkylation technique comprises use of an amount (containing solution based on the final concentration in the sample) of an alkylating agent, e.g., IAA, of about 15 mM to about 40 mM, such as any of about 20 mM, 20.5 mM, 21 mM, 21.5 mM, 22 mM, 22.5 mM, 23 mM, 23.5 mM, 24 mM, 24.5 mM, 25 mM, 25.5 mM, 26 mM, 26.5 mM, 27 mM, 27.5 mM, 28 mM, 28.5 mM, 29 mM, 29.5 mM, 30 mM, 30.5 mM, 31 mM, 31.5 mM, 32 mM, 32.5 mM, 33 mM, 33.5 mM, 34 mM, 34.5 mM, 35 mM, 35.5 mM, 36 mM, 36.5 mM, 37 mM, 37.5 mM, 38 mM, and an alkylation incubation time of about 5 minutes to about 60 minutes, such as about any of 15 minutes, 20 minutes, 25 minutes, 30 minutes, 35 minutes, or 40 minutes, wherein the alkylation incubation time is performed at a temperature of about 15° C. to about 30° C., such about any of 20° C., 21° C., 22° C., 23° C., 24° C., or 25° C.

[0900] The alkylation incubation temperature can be controlled by numerous techniques and combinations thereof. In some embodiments, the alkylation incubation temperature is controlled by an ambient temperature, such as room temperature. In some embodiments, the alkylation incubation temperature is controlled by a water bath. In some embodiments, the alkylation incubation temperature is controlled by a heat block. In some embodiments, the alkylation incubation temperature is controlled by a thermocycler, e.g., a thermocycler with a lid temperature control element. As described herein, in some embodiments, control of sample temperature when performed using a thermocycler is via a temperature block element. In some embodiments, temperature changes prior to and/or after the alkylation incubation time temperature are controlled by a technique described herein, such as cooling at room temperature or a ramp rate.

[0901] In some embodiments, the alkylation technique comprises subjecting a sample, or a derivative thereof, e.g., a denatured sample, to a thermal cycle. In some embodiments, the thermal cycle comprises subjecting the sample, or a derivative thereof, to one or more of: (a) a block starting temperature (b) block set temperature (the temperature for the alkylation incubation time); (c) a block ending temperature; (d) one or more ramp rates between temperature changes in the thermal cycle (such as between the block starting temperature and the block set temperature or between the block set temperature and the block ending temperature); and (e) a lid temperature relative to the block temperature. In some embodiments, the thermal cycle is performed, in whole or in part, using a thermocycler. In some embodiments, the thermal cycle is configured to reduce and/or prevent loss of sample, such as by escaping vapor and/or condensation when the sample container is opened. In some embodiments, the thermal cycle comprises a set block temperature of about 15° C. to about 30° C., such as any of 15° C. to about 25° C., about 20° C. to about 30° C., or about 20° C. to about 25° C., including about any of 20° C., 21° C., 22° C., 23° C., 24° C., or 25° C. In some embodiments, the thermal cycle comprises: (a) a set block temperature of about 15° C. to about 30° C., such as any of 15° C. to about 25° C., about 20° C. to about 30° C., or about 20° C. to about 25° C., including about any of 20° C., 21° C., 22° C., 23° C., 24° C., 25° C., and (b) a block ending temperature of about 15° C. to about 35° C., such as any of about 20° C. to about 35° C., or about 20° C. to about 25° C. In some embodiments, the thermal cycle comprises: (a) starting block temperature of about 15° C. to about 30° C., such as any of 15° C. to about 25° C., about 20° C. to about 30° C., or about 20° C. to about 25° C., including about any of 20° C., 21° C., 22° C., 23° C., 24° C., 25° C., (b) a set block temperature of about 15° C. to about 30° C., such as any of 15° C. to about 25° C., about 20° C. to about 30° C., or about 20° C. to about 25° C., including about any of 20° C., 21° C., 22° C., 23° C., 24° C., 25° C., and (c) a block ending temperature of about 15° C. to about 35° C., such as any of about 20° C. to about 35° C., or about 20° C. to about 25° C. In any of the thermal cycles described herein, in some embodiments, the lid temperature during the thermal cycle is configured to reduce and/or inhibit condensate formation near or on the lid of a sample container. In some embodiments, the lid temperature during the thermal cycle is at least about 2° C., such as at least about any of 2.5° C., 3° C., 3.5° C., 4° C., 4.5° C., 5° C., 5.5° C., 6° C., 6.5° C., 7° C., 7.5° C., 8° C., 8.5° C., 9° C., 9.5° C., 10° C., 11° C., 12° C., 13° C., 14° C., 15° C., 16° C., 17° C., 18° C., 19° C., or 20° C., higher than the respective temperature of the block during the thermal cycle. In some embodiments, the lid temperature during at least a portion of a thermal cycle is about 102° C. to about 120° C., such as about any of 103° C., 104° C., 105° C., 106° C., 107° C., 108° C., 109° C., or 110° C.

[0902] In some embodiments, the alkylation technique further comprises quenching the alkylating agent comprising use of a neutralizing agent. In some embodiments, the neutralizing agent is a reducing agent. In some embodiments, the reducing agent is dithiothreitol (DTT), tris(2-carboxyethyl) phosphine (TCEP), beta-mercaptoethanol (BME), or a cysteine, or any mixture thereof. In some embodiments, the neutralizing agent is added in an amount to fully quench the amount of the alkylating agent, such as in an amount greater than or equal to a molar amount of an active moiety of the alkylating agent. In some embodiments, the amount (as assessed based on the final concentration in the sample containing solution) of the neutralizing agent is about 1 mM to about 100 mM.

[0903] In some embodiments, the alkylation technique, in whole or in part, is performed substantially in a low light condition. In some embodiments, the alkylation incubation time is performed in a low light condition. In some embodiments, the low light condition is in the dark or a location substantially devoid of sunlight and/or room lighting, such as in a desk drawer. In some embodiments, the low light condition is a filtered light, such as red light.

[0904] In some embodiments, the alkylating agent is sourced from a stock solution. In some embodiments, the stock solution is prepared within about 1 hour, such as within about any of 50 minutes, 40 minutes, 30 minutes, 20 minutes, or 10 minutes, of use.

[0905] In some embodiments, the ramp rate between a temperature change in a thermal cycle (such as between a block starting temperature and a block set temperature and/or between a block set temperature a the block ending temperature) is about 1° C./second to about 10° C./second, such as any of 1° C./second, 1.5° C./second, 2° C./second, 2.5° C./second, 3° C./second, 3.5° C./second, 4° C./second, 4.5° C./second, 5° C./second, 5.5° C./second, 6° C./second, 6.5° C./second, 7° C./second, 7.5° C./second, 8° C./second, 8.5° C./second, 9° C./second, 9.5° C./second, or 10° C./second.

### IV. Proteolytic Digestion Techniques

[0906] In certain aspects, the methods provided herein comprise performing a proteolytic digestion technique. In some embodiments, the proteolytic digestion technique is performed on a sample, or a derivative thereof, following thermal denaturation and/or any additional steps intended to expose protease cleavage sites. Proteolytic digestion techniques, generally speaking, cleave polypeptides at known cleavage sites. For example, trypsin is a serine protease that generally cleaves polypeptides at the carboxyl side (C-terminal side) of lysine and arginine residues. Certain exceptions apply to the cleavage pattern of trypsin, such as due to proximity of a proline residue and/or a post-translational modification causing steric hindrance relative to the cleavage site. Proteolytic digestion techniques described herein comprise subjecting a sample, or a derivative thereof (e.g., a denatured sample or an alkylated sample, including an alkylated sample subjected to a reduction technique prior to an alkylation technique), to an amount of one or more proteases and incubating for a digestion incubation time performed at a temperature or range thereof.

[0907] In some embodiments, each of the one or more proteases is trypsin, LysC, LysN, AspN, GluC, ArgC, IdeS, IdeZ, PNGase F, thermolysin, pepsin, elastase, TEV, or Factor Xa, or any mixture thereof. In some embodiments, wherein two or more proteases are used, the weight ratio between a first protease and a second protease is about 1:10 to about 10:1, such as about any of about 1:9, 1:8, 1:7: 1:6, 1:5, 1:4, 1:3, 1:2, or 1:1. In some embodiments, the one or more proteases is trypsin. In some embodiments, the one or more proteases is a mixture of trypsin and LysC, such as in a weight ratio of about 1:1.

[0908] In some embodiments, the one or more proteases and amounts thereof are selected based on the type and/or characteristic of a biological sample and/or fibrinogen-depleted sample, or a derivative thereof, used in the methods herein. In some embodiments, the method comprises subjecting a fibrinogen-depleted sample, or a derivative thereof, to one or more proteases are present at a weight ratio of about 1:30 or less, relative to polypeptide content of the fibrinogen-depleted sample, or a derivative thereof. In some embodiments, the one or more proteases are added at a weight ratio of about 1:15 to about 1:25, relative to polypeptide content of the fibrinogen-depleted sample, or the derivative thereof. As described herein, the fibrinogen-depleted samples have lower complexity, such as compared to a plasma sample, and in some embodiments the method comprise a proteolytic digestion technique only using a single protease type (e.g., trypsin).

[0909] In some embodiments, the fibrinogen-depleted sample, or a derivative thereof, is digested using trypsin. In some embodiments, the protease, such as trypsin, is a modified protease, such as comprising a modification to prevent or inhibit self-proteolysis. In some embodiments, the modified protease is a modified trypsin, such as a methylated and/or an acetylated trypsin. In some embodiments, the modified trypsin is a tosyl phenylalanyl chloromethyl ketone (TPCK)-treated trypsin.

[0910] In some embodiments, the amount of a protease, e.g., trypsin or LysC, used in a proteolytic digestion technique is based on a weight ratio relative to the polypeptide content of a sample, or a derivative thereof, (i.e., weight of a protease: weight of polypeptide content) of about 1:200 to about 1:10, such as any of about 1:100 to about 1:10, about 1:50 to about 1:10, about 1:40 to about 1:20, about 1:50 to about 1:30, about 1:45 to about 1:35, about 1:20 to about 1:40, about 1:30 to about 1:10, or about 1:25 to about 1:15. In some embodiments, the amount of a protease used in a proteolytic digestion technique is at least about 1:200, such as at least about any of 1:190, 1:180, 1:170, 1:160, 1:150, 1:140, 1:130, 1:120, 1:110, 1:100, 1:95, 1:90, 1:85, 1:80, 1:75, 1:70, 1:65, 1:60, 1:55, 1:50, 1:45, 1:40, 1:35, 1:30, 1:25, 1:20, 1:15, or 1:10. In some embodiments, the amount of a protease used in a proteolytic digestion technique is about 1:10 or less, such as about any of 1:15 or less, 1:20 or less, 1:25 or less, 1:30 or less, 1:35 or less, 1:40 or less, 1:45 or less, 1:50 or less, 1:55 or less, 1:60 or less, 1:65 or less, 1:70 or less, 1:75 or less, 1:80 or less, 1:85 or less, 1:90 or less, 1:95 or less, 1:100 or less, 1:110 or less, 1:120 or less, 1:130 or less, 1:140 or less, 1:150 or less, 1:160 or less, 1:170 or less, 1:180 or less, 1:190 or less, or 1:200 or less. In some embodiments, the amount of a protease used in a proteolytic digestion technique is about any of 1:10, 1:15, 1:20, 1:25, 1:30, 1:35, 1:40, 1:45, 1:50, 1:55, 1:60, 1:65, 1:70, 1:75, 1:80, 1:85, 1:90, 1:95, 1:100, 1:110, 1:120, 1:130, 1:140, 1:150, 1:160, 1:170, 1:180, 1:190, or 1:200. In some embodiments, the proteolytic digestion technique comprises the use of two or more proteases, such as a combination of trypsin and LysC, and in such embodiments, the amount of each protease (such as described above) can be summed to a total amount of proteases used in a proteolytic digestion technique.

[0911] In some embodiments, the proteolytic digestion incubation time is about 20 minutes to about 36 hours, such as any of about 1 hour to about 18 hours, about 5 hours to about 24 hours, about 12 hours to about 24 hours, about 16 hours to about 20 hours, or about 12 hours to about 36 hours. In some embodiments, the proteolytic digestion incubation time is about 36 hours or less, such as about any of 32 hours or less, 30 hours or less, 28 hours or less, 26 hours or less, 24 hours or less, 22 hours or less, 20 hours or less, 19 hours or less, 18 hours or less, 17 hours or less, 16 hours or less, 15 hours or less, 14 hours or less, 13 hours or less, 12 hours or less, 11 hours or less, 10 hours or less, 9 hours or less, 8 hours or less, 7 hours or less, 6 hours or less, 5 hours or less, 4 hours or less, 3 hours or less, 2 hours or less, or 1 hours or less. In some embodiments, the proteolytic digestion incubation time is at least about 20 minutes, such as at least about any of 30 minutes, 40 minutes, 50 minutes, 1 hour, 2 hours, 3 hours, 4 hours, 5 hours, 6 hours, 7 hours, 8 hours, 9 hours, 10 hours, 11 hours, 12 hours, 13 hours, 14 hours, 15 hours, 16 hours, 17 hours, 18 hours, 19 hours, 20 hours, 22 hours, 24 hours, 26 hours, 28 hours, 30 hours, 32 hours, 34 hours, or 36 hours. In some embodiments, the proteolytic digestion incubation time is about any of 20 minutes, 30 minutes, 40 minutes, 50 minutes, 1 hour, 2 hours, 3 hours, 4 hours, 5 hours, 6 hours, 7 hours, 8 hours, 9 hours, 10 hours, 11 hours, 12 hours, 13 hours, 14 hours, 15 hours, 16 hours, 17 hours, 18 hours, 19 hours, 20 hours, 22 hours, 24 hours, 26 hours, 28 hours, 30 hours, 32 hours, 34 hours, or 36 hours.

[0912] In some embodiments, the digestion incubation time is performed at a temperature of about 20° C. to about 60° C., such as any of about 20° C. to about 25° C., about 20° C. to about 30° C., about 25° C. to about 40° C., about 35° C. to about 40° C., or about 35° C. to about 50° C. In some embodiments, the digestion incubation time is performed at a temperature of at least about 20° C., such as at least about any of 21° C., 22° C., 23° C., 24° C., 25° C., 26° C., 27° C., 28° C., 29° C., 30° C., 31° C., 32° C., 33° C., 34° C., 35° C., 36° C., 37° C., 38° C., 39° C., 40° C., 42° C., 44° C., 46° C., 48° C., 50° C., 52° C., 54° C., 56° C., 58° C., or 60° C. In some embodiments, the digestion incubation time is performed at a temperature of about 60° C. or less, such about any of 58° C. or less, 56° C. or less, 54° C. or less, 52° C. or less, 50° C. or less, 48° C. or less, 46° C. or less, 44° C. or less, 42° C. or less, 40° C. or less, 39° C. or less, 38° C. or less, 37° C. or less, 36° C. or less, 35° C. or less, 34° C. or less, 33° C. or less, 32° C. or less, 31° C. or less, 30° C. or less, 29° C. or less, 28° C. or less, 27° C. or less, 26° C. or less, 25° C. or less, 24° C. or less, 23° C. or less, 22° C. or less, 21° C. or less, or 20° C. or less. In some embodiments, the digestion incubation time is performed at a temperature of about any of 20° C., 21° C., 22° C., 23° C., 24° C., 25° C., 26° C., 27° C., 28° C., 29° C., 30° C., 31° C., 32° C., 33° C., 34° C., 35° C., 36° C., 37° C., 38° C., 39° C., 40° C., 42° C., 44° C., 46° C., 48° C., 50° C., 52° C., 54° C., 56° C., 58° C., or 60° C. In some embodiments, the reduction incubation time is performed at a room temperature.

[0913] In some embodiments, the proteolytic digestion technique comprises a digestion incubation time of about 12 hours to about 24 hours, such as about any of 13 hours, 14 hours, 15 hours, 16 hours, 17 hours, 18 hours, 19 hours, 20 hours, 21 hours, 22 hours, 23 hours, wherein the digestion incubation time is performed at a temperature of about 20° C. to about 40° C., such about any of 22° C., 24° C., 26° C., 28° C., 30° C., 31° C., 32° C., 33° C., 34° C., 35° C., 36° C., 37° C., 38° C., 39° C. In some embodiments, the proteolytic digestion technique comprises use of an amount a protease for each of one or more proteases, e.g., trypsin and/or LysC, of about 1:15 to about 1:45, such as about any of 1:20, 1:25, 1:30, 1:35, or 1:40 (as measured based on the amount of the protease to the amount of polypeptide in a sample or a derivative thereof), and a digestion incubation time of about 12 hours to about 24 hours, such as about any of 13 hours, 14 hours, 15 hours, 16 hours, 17 hours, 18 hours, 19 hours, 20 hours, 21 hours, 22 hours, 23 hours, wherein the digestion incubation time is performed at a temperature of about 20° C. to about 40° C., such about any of 22° C., 24° C., 26° C., 28° C., 30° C., 31° C., 32° C., 33° C., 34° C., 35° C., 36° C., 37° C., 38° C., 39° C. In some embodiments, the proteolytic digestion technique is performed on a plasma sample or a derivate thereof, wherein the proteolytic digestion technique comprises a 1:40 ratio of trypsin to polypeptide in the sample of the derivative thereof and a 1:40 ratio of LysC to polypeptide in the sample or the derivative thereof. In some embodiments, the proteolytic digestion technique is performed on a serum sample or a derivate thereof, wherein the proteolytic digestion technique comprises a 1:20 ratio of trypsin.

[0914] The digestion incubation temperature can be controlled by numerous techniques and combinations thereof. In some embodiments, the digestion incubation temperature is controlled by an ambient temperature, such as room temperature. In some embodiments, the digestion incubation temperature is controlled by a water bath. In some embodiments, the digestion incubation temperature is controlled by a heat block. In some embodiments, the digestion incubation temperature is controlled by a thermocycler, e.g., a thermocycler with a lid temperature control element. As described herein, in some embodiments, control of sample temperature when performed using a thermocycler is via a temperature block element. In some embodiments, temperature changes prior to and/or after the digestion incubation time temperature are controlled by a technique described herein, such as cooling at room temperature or a ramp rate.

[0915] In some embodiments, the proteolytic digestion technique comprises subjecting a sample, or a derivative thereof, e.g., an alkylated sample (including an alkylated sample quenched with a neutralizing agent), to a thermal cycle. In some embodiments, the thermal cycle comprises subjecting the sample, or a derivative thereof, to one or more of: (a) a block starting temperature (b) block set temperature (the temperature for the digestion incubation time); (c) a block ending temperature; (d) one or more ramp rates between temperature changes in the thermal cycle (such as between the block starting temperature and the block set temperature or between the block set temperature and the block ending temperature); and (e) a lid temperature relative to the block temperature. In some embodiments, the thermal cycle is performed, in whole or in part, using a thermocycler. In some embodiments, the thermal cycle is configured to reduce and/or prevent loss of sample, such as by escaping vapor and/or condensation when the sample container is opened. In some embodiments, the thermal cycle comprises a set block temperature of about 20° C. to about 50° C., including about any of 22° C., 24° C., 26° C., 28° C., 30° C., 31° C., 32° C., 33° C., 34° C., 35° C., 36° C., 37° C., 38° C., 39° C., 40° C., 42° C., 44° C., 46° C., 48° C.

[0916] In some embodiments, the thermal cycle comprises: (a) a set block temperature of about 20° C. to about 50° C., including about any of 22° C., 24° C., 26° C., 28° C., 30° C., 31° C., 32° C., 33° C., 34° C., 35° C., 36° C., 37° C., 38° C., 39° C., 40° C., 42° C., 44° C., 46° C., 48° C., and (b) a block ending temperature of about 15° C. to about 35° C., such as any of about 20° C. to about 35° C., or about 20° C. to about 25° C. In some embodiments, the thermal cycle comprises: (a) starting block temperature of about 15° C. to about 35° C., such as any of about 20° C. to about 35° C., or about 20° C. to about 25° C., (b) a set block temperature of about 20° C. to about 50° C., including about any of 22° C., 24° C., 26° C., 28° C., 30° C., 31° C., 32° C., 33° C., 34° C., 35° C., 36° C., 37° C., 38° C., 39° C., 40° C., 42° C., 44° C., 46° C., 48° C., and (c) a block ending temperature of about 15° C. to about 35° C., such as any of about 20° C. to about 35° C., or about 20° C. to about 25° C. In any of the thermal cycles described herein, in some embodiments, the lid temperature during the thermal cycle is configured to reduce and/or inhibit condensate formation near or on the lid of a sample container. In some embodiments, the lid temperature during the thermal cycle is at least about 2° C., such as at least about any of 2.5° C., 3° C., 3.5° C., 4° C., 4.5° C., 5° C., 5.5° C., 6° C., 6.5° C., 7° C., 7.5° C., 8° C., 8.5° C., 9° C., 9.5° C., 10° C., 11° C., 12° C., 13° C., 14° C., 15° C., 16° C., 17° C., 18° C., 19° C., or 20° C., higher than the respective temperature of the block during the thermal cycle. In some embodiments, the lid temperature during at least a portion of a thermal cycle is about 102° C. to about 120° C., such as about any of 103° C., 104° C., 105° C., 106° C., 107° C., 108° C., 109° C., or 110° C.

[0917] In some embodiments, the ramp rate between a temperature change in a thermal cycle (such as between a block starting temperature and a block set temperature and/or between a block set temperature a the block ending temperature) is about 1° C./second to about 10° C./second, such as any of 1° C./second, 1.5° C./second, 2° C./second, 2.5° C./second, 3° C./second, 3.5° C./second, 4° C./second, 4.5° C./second, 5° C./second, 5.5° C./second, 6° C./second, 6.5° C./second, 7° C./second, 7.5° C./second, 8° C./second, 8.5° C./second, 9° C./second, 9.5° C./second, or 10° C./second.

[0918] In some embodiments, the proteolytic digestion technique further comprises quenching the one or more proteolytic enzymes. In some embodiments, quenching the one or more proteolytic enzymes comprises denaturing the one or more proteolytic enzymes. In some embodiments, quenching the one or more proteolytic enzymes comprise adding an amount of an acid. In some embodiments, the acid is formic acid (FA) or trifluoroacetic acid (TFA), or a mixture thereof. In some embodiments, the amount (as assessed based on the final concentration in the sample containing solution) of the acid added is about any of 0.1% v/v, 0.2% v/v, 0.3% v/v, 0.4% v/v, 0.5% v/v, 0.6% v/v, 0.7% v/v, 0.8% v/v, 0.9% v/v, 1% v/v, 1.1% v/v, 1.2% v/v, 1.3% v/v, 1.4% v/v, 1.5% v/v, 1.6% v/v, 1.7% v/v, 1.8% v/v, 1.9% v/v, or 2% v/v.

### V. Additional Techniques

[0919] In certain aspects, the method provided herein comprise subjecting the proteolytic digest sample comprising a proteolytic glycopeptide to one or more additional steps prior to subjecting the proteolytic digested sample, or a derivative thereof, to a liquid chromatography-mass spectrometry (LC-MS) technique using a liquid chromatography system and a mass spectrometer. In some embodiments, the LC system is online with the MS (i.e., eluate from the LC system is directly introduced to the MS).

[0920] In some embodiments, the method further comprises adding a standard to the proteolytic digest sample prior to the LC-MS technique. In some embodiments, the standard is a stable isotope-internal standard (SI-IS) peptide mixture.

[0921] In some embodiments, the fibrinogen-depleted sample, or a derivative thereof, is not subjected to a high-abundant protein depletion technique (other than the fibrinogen-depletion methods taught herein) prior to the thermal denaturation technique. For example, in some embodiments, the high-abundant protein depletion technique removes highly abundant proteins present in a blood sample, such as serum albumin.

### E6. Methods for Processing a Proteolytic Digest Sample

### I. Reversed-Phase (RP)-Based Techniques

[0922] Provided herein, in certain aspects, are methods of processing a proteolytically digested sample using a solid phase extraction column comprising a reversed-phase material. As described in the instant application, in some embodiments, the techniques taught herein for subjecting a proteolytically digested sample to the solid phase extraction column and/or subjecting the reversed-phase medium comprising associated proteolytic polypeptides to a wash buffer provide improved LC-MS analyses of proteolytic glycopeptides. In some embodiments, the method comprises subjecting a proteolytically digested sample to a solid phase extraction column comprising a reversed-phase medium to associate at least a portion of a plurality of proteolytic polypeptides with the reversed-phase medium, wherein the polypeptide loading amount used for subjecting the reversed-phase medium to the portion of the plurality of proteolytic polypeptides is about 50% or less of a binding capacity of the reversed-phase medium, and wherein the binding capacity of the reversed-phase medium is based on an insulin load having 10% or less breakthrough. In some embodiments, the method comprises subjecting a proteolytically digested sample to a solid phase extraction column comprising a reversed-phase medium to associate at least a portion of a plurality of proteolytic polypeptides with the reversed-phase medium, wherein the polypeptide loading concentration used for subjecting the proteolytic polypeptides to the reversed-phase medium is about 0.6 μg/μL or less. In some embodiments, the method comprises subjecting a reversed-phase medium comprising the associated proteolytic polypeptides to a wash buffer at a wash flow rate of about 0.1 column volumes/minute to about 2 column volumes/minute.

[0923] In the following sections, additional description of the various aspects of the methods for processing a proteolytically digested sample is provided. Such description in a modular fashion is not intended to limit the scope of the disclosure, and based on the teachings provided herein one of ordinary skill in the art will readily appreciate that certain modules can be integrated, at least in part. The section heading used herein are for organizational purposes only and are not to be construed as limiting the subject matter described.

a. Polypeptide Loading Amounts

[0924] In certain aspects, provided herein is a method for processing a proteolytically digested sample to produce a processed sample suitable for use in a liquid chromatography-mass spectrometry (LC-MS) analysis, wherein the method comprises subjecting the proteolytically digested sample to a solid phase extraction column comprising a reversed-phase medium according to a desired polypeptide loading amount based on the binding capacity of the reversed-phase medium. In some embodiments, the method comprises subjecting a proteolytically digested sample to a solid phase extraction column comprising a reversed-phase medium to associate at least a portion of a plurality of proteolytic polypeptides with the reversed-phase medium, wherein the polypeptide loading amount used for subjecting the reversed-phase medium to the portion of the plurality of proteolytic polypeptides is 50% or less of a binding capacity of the reversed-phase medium, and wherein the binding capacity of the reversed-phase medium is based on an insulin load having 10% or less breakthrough.

[0925] The polypeptide loading amounts encompassed herein may be described using a number of approaches, e.g., a percentage of the total binding capacity as defined by a known relevant binding capacity of a solid phase extraction column, or an absolute amount of polypeptide loaded onto a solid phase extraction column. One of ordinary skill in the art will readily understand converting between different forms of the description provided herein, and determining a binding capacity of a solid phase extraction column if not already known.

[0926] In some embodiments, the polypeptide loading amount is about 1% to about 50%, such as any of about 5% to about 50%, about 7.5% to about 50%, about 7.5% to about 25%, about 15% to about 50%, about 15% to about 25%, of a binding capacity of a reversed-phase medium of a solid phase extraction column. In some embodiments, the polypeptide loading amount is about 50% or less, such as any of 45% or less, 40% or less, 35% or less, 30% or less, 25% or less, 24% or less, 23% or less, 22% or less, 21% or less, 20% or less, 19% or less, 18% or less, 17% or less, 16% or less, 15% or less, 14% or less, 13% or less, 12% or less, 11% or less, 10% or less, 9.5% or less, 9% or less, 8.5% or less, 8% or less, or 7.5% or less, of a binding capacity of a reversed-phase medium of a solid phase extraction column. In some embodiments, the polypeptide loading amount is about 7.5%, 8%, 8.5%, 9%, 9.5%, 10%, 11%, 12%, 13%, 14%, 15%, 16%, 17%, 18%, 19%, 20%, 21%, 22%, 23%, 24%, 25%, 30%, 35%, 40%, 45%, or 50%, of a binding capacity of a reversed-phase medium of a solid phase extraction column. In any of the embodiments above, the binding capacity of the reversed-phase medium is based on an insulin load having 10% or less breakthrough. In any of the embodiments above, the binding capacity of the reversed-phase medium of the solid phase extraction column is about 400 μg.

[0927] In some embodiments, the polypeptide loading amount is about 1% to about 50%, such as any of about 5% to about 50%, about 7.5% to about 50%, about 7.5% to about 25%, about 15% to about 50%, about 15% to about 25%, of a binding capacity of a reversed-phase medium of a solid phase extraction column, wherein the binding capacity of the reversed-phase medium of the solid phase extraction column is about 400 μg. In some embodiments, the polypeptide loading amount is about 50% or less, such as any of 45% or less, 40% or less, 35% or less, 30% or less, 25% or less, 24% or less, 23% or less, 22% or less, 21% or less, 20% or less, 19% or less, 18% or less, 17% or less, 16% or less, 15% or less, 14% or less, 13% or less, 12% or less, 11% or less, 10% or less, 9.5% or less, 9% or less, 8.5% or less, 8% or less, or 7.5% or less, of a binding capacity of a reversed-phase medium of a solid phase extraction column, wherein the binding capacity of the reversed-phase medium of the solid phase extraction column is about 400 μg. In some embodiments, the polypeptide loading amount is about 7.5%, 8%, 8.5%, 9%, 9.5%, 10%, 11%, 12%, 13%, 14%, 15%, 16%, 17%, 18%, 19%, 20%, 21%, 22%, 23%, 24%, 25%, 30%, 35%, 40%, 45%, or 50%, of a binding capacity of a reversed-phase medium of a solid phase extraction column, wherein the binding capacity of the reversed-phase medium of the solid phase extraction column is about 400 μg. In any of the embodiments above, the binding capacity of the reversed-phase medium is based on an insulin load having 10% or less breakthrough.

[0928] In some embodiments, the polypeptide loading amount is about 30 μg to about 200 μg, such as any of about 30 μg to about 100 μg, about 30 μg to about 60 μg to about 200 μg, or about 60 μg to about 100 μg, wherein the binding capacity of the reversed-phase medium of the solid phase extraction column is about 400 μg. In some embodiments, the polypeptide loading amount is about 200 μg or less, such as any of 175 μg or less, 150 μg or less, 125 μg or less, 100 μg or less, 95 μg or less, 90 μg or less, 85 μg or less, 80 μg or less, 75 μg or less, 70 μg or less, 65 μg or less, 60 μg or less, 55 μg or less, 50 μg or less, 45 μg or less, 40 μg or less, 35 μg or less, or 30 μg or less, wherein the binding capacity of the reversed-phase medium of the solid phase extraction column is about 400 μg. In some embodiments, the polypeptide loading amount about any of 30 μg, 35 μg, 40 μg, 45 μg, 50 μg, 55 μg, 60 μg, 65 μg, 70 μg, 75 μg, 80 μg, 85 μg, 90 μg, 95 μg, 100 μg, 125 μg, 150 μg, 175 μg, or 200 μg, wherein the binding capacity of the reversed-phase medium of the solid phase extraction column is about 400 μg. In any of the embodiments above, the binding capacity of the reversed-phase medium is based on an insulin load having 10% or less breakthrough.

[0929] In some embodiments, the polypeptide loading amount is about 30 μg to about 200 μg, such as any of about 30 μg to about 100 μg, about 30 μg to about 60 μg to about 200 μg, or about 60 μg to about 100 μg, wherein the solid phase extraction column comprises a volume of about 5 μL of a reversed-phase medium. In some embodiments, the polypeptide loading amount is about 200 μg or less, such as any of 175 μg or less, 150 μg or less, 125 μg or less, 100 μg or less, 95 μg or less, 90 μg or less, 85 μg or less, 80 μg or less, 75 μg or less, 70 μg or less, 65 μg or less, 60 μg or less, 55 μg or less, 50 μg or less, 45 μg or less, 40 μg or less, 35 μg or less, or 30 μg or less, wherein the solid phase extraction column comprises a volume of about 5 μL of a reversed-phase medium. In some embodiments, the polypeptide loading amount about any of 30 μg, 35 μg, 40 μg, 45 μg, 50 μg, 55 μg, 60 μg, 65 μg, 70 μg, 75 μg, 80 μg, 85 μg, 90 μg, 95 μg, 100 μg, 125 μg, 150 μg, 175 μg, or 200 μg, wherein the solid phase extraction column comprises a volume of about 5 μL of a reversed-phase medium. In any of the embodiments above, the binding capacity of the reversed-phase medium of the solid phase extraction column is about 400 μg. In any of the embodiments above, the binding capacity of the reversed-phase medium is based on an insulin load having 10% or less breakthrough.

[0930] The solid phase extraction columns described herein may comprise a reversed-phase medium, or an amount thereof, encompassing a range of binding capacities for the solid phase extraction column. In some embodiments, the solid phase extraction column comprises a binding capacity of about 1 μg to about 1,000 μg, such as any of about 100 μg to about 500 μg, about 200 μg to about 500 μg, about 300 μg to about 500 μg, about 350 μg to about 500 μg, or about 350 μg to about 750 μg, such as assessed using a polypeptide or a mixture thereof, including insulin. In some embodiments, the binding capacity is based on the amount of a polypeptide (including mixtures of polypeptides) that can be associated with the reversed-phase medium of a solid phase extraction column prior to occurrence of breakthrough (loss of polypeptides in the load that occurs during a binding phase such that a portion of the polypeptide is not captured by the reversed-phase medium) 10% or more. In some embodiments, the binding capacity of the reversed-phase medium is based on a polypeptide load having 10% or less, such as any of 9% or less, 8% or less, 7% or less, 6% or less, 5% or less, 4% or less, 3% or less, 2% or less, or 1% or less, breakthrough.

[0931] Polypeptide amounts described herein may be absolute or estimated amounts. In some embodiments, the amount of polypeptide content in a sample, or a derivative thereof, is a measured directly from said sample, or the derivative thereof, e.g., using a BCA quantification assay or a UV-VIS measurement at 280 nm. In some embodiments, the amount of polypeptide content in a sample, or a derivative thereof, is estimated based on a known, including reference standard, value for polypeptide content in the sample based on the origin of the sample, e.g., such as based on a known standard polypeptide concentration in human plasma or serum.

b. Polypeptide Loading Concentrations

[0932] In certain aspects, provided herein is a method for processing a proteolytically digested sample to produce a processed sample suitable for use in a liquid chromatography-mass spectrometry (LC-MS) analysis, wherein the method comprises subjecting the proteolytically digested sample to a solid phase extraction column comprising a reversed-phase medium according to a desired polypeptide loading concentration. In some embodiments, the method comprises subjecting a proteolytically digested sample to a solid phase extraction column comprising a reversed-phase medium to associate at least a portion of a plurality of proteolytic polypeptides with the reversed-phase medium, wherein the polypeptide loading concentration used for subjecting the proteolytic polypeptides to the reversed-phase medium is about 0.6 μg/μL or less.

[0933] In some embodiments, the polypeptide loading concentration used for subjecting polypeptides of the proteolytically digested sample to a reversed-phase medium of a solid phase extraction column is about 0.1 μg/μL to about 1 μg/μL, such as any of about 0.25 μg/μL to about 1 μg/μL, about 0.25 μg/μL to about 0.75 μg/μL, or about 0.3 μg/μL to about 0.6 μg/μL. In some embodiments, the polypeptide loading concentration used for subjecting polypeptides of the proteolytically digested sample to a reversed-phase medium of a solid phase extraction column is about 1 μg/μL or less, such as about any of 0.95 μg/μL or less, 0.9 μg/μL or less, 0.85 μg/μL or less, 0.8 μg/μL or less, 0.75 μg/μL or less, 0.7 μg/μL or less, 0.65 μg/μL or less, 0.6 μg/μL or less, 0.55 μg/μL or less, 0.5 μg/μL or less, 0.45 μg/μL or less, 0.4 μg/μL or less, 0.35 μg/μL or less, or 0.3 μg/μL or less. In some embodiments, the polypeptide loading concentration used for subjecting polypeptides of the proteolytically digested sample to a reversed-phase medium of a solid phase extraction column is about any of 1 μg/μL 0.95 μg/μL, 0.9 μg/μL, 0.85 μg/μL, 0.8 μg/μL, 0.75 μg/μL, 0.7 μg/μL, 0.65 μg/μL, 0.6 μg/μL, 0.55 μg/μL, 0.5 μg/μL, 0.45 μg/μL, 0.4 μg/μL, 0.35 μg/μL, or 0.3 μg/μL.

[0934] In some embodiments, the polypeptides of the proteolytically digested sample for subjecting to the solid phase extraction column are in a volume of about 50 μL to about 500 μL, such as any of about 50 μL to about 300 μL, about 50 μL to about 250 μL, or about 100 μL to about 200 μL. In some embodiments, the polypeptides of the proteolytically digested sample for subjecting to the solid phase extraction column are in a volume of at least about 50 μL, such as at least about any of 75 μL, 100 μL, 125 μL, 150 μL, 175 μL, 200 μL, 225 μL, 250 μL, 275 μL, 300 μL, 325 μL, 350 μL, 375 μL, 400 μL, 425 μL, 450 μL, 475 μL, or 500 μL. In some embodiments, the polypeptides of the proteolytically digested sample for subjecting to the solid phase extraction column are in a volume that is at least about 40%, such as at least about any of 45%, 50%, 55%, 60%, 65%, 70%, 75%, 80%, 85%, 90%, or 95%, of the upper range recommended for a solid phase extraction column, such as per manufacturer's instructions. In some embodiments, the volume loaded onto the solid phase extraction column comprises a loading buffer.

[0935] As discussed herein, polypeptide amounts described herein may be absolute or estimated amounts. In some embodiments, the amount of polypeptide content in a sample, or a derivative thereof, is a measured directly from said sample, or the derivative thereof, e.g., using a BCA quantification assay. In some embodiments, the amount of polypeptide content in a sample, or a derivative thereof, is estimated based on a known, including reference standard, value for polypeptide content in the sample based on the origin of the sample, e.g., such as based on a known standard polypeptide concentration in human plasma or serum.

c. Wash Buffer Flow Rates

[0936] In certain aspects, provided herein is a method for processing a proteolytically digested sample to produce a processed sample suitable for use in a liquid chromatography-mass spectrometry (LC-MS) analysis, wherein the method comprises subjecting a reversed-phase medium comprising the associated proteolytic polypeptides to a wash buffer at a desired wash flow rate. In some embodiments, the method comprises subjecting a reversed-phase medium comprising the associated proteolytic polypeptides to a wash buffer at a wash flow rate of about 0.1 column volumes/minute to about 2 column volumes/minute.

[0937] In some embodiments, the wash flow rate of the wash buffer is about 0.1 column volumes/minute to about 2 column volumes/minute, such as any of about 0.1 column volumes/minute to about 0.5 column volumes/minute, about 0.25 column volumes/minute to about 2 column volumes/minute, about 0.25 column volumes/minute to about 1.5 column volumes/minute, or about 0.3 column volumes/minute to about 1 column volumes/minute. In some embodiments, the wash flow rate of the wash buffer is less than about 2, such as less than about any of 1.9 column volumes/minute, 1.8 column volumes/minute, 1.7 column volumes/minute, 1.6 column volumes/minute, 1.5 column volumes/minute, 1.4 column volumes/minute, 1.3 column volumes/minute, 1.2 column volumes/minute, 1.1 column volumes/minute, 1 column volume/minute, 0.9 column volumes/minute, 0.8 column volumes/minute, 0.7 column volumes/minute, 0.6 column volumes/minute, 0.5 column volumes/minute, 0.4 column volumes/minute, 0.3 column volumes/minute or 0.2 column volumes/minute. In some embodiments, the wash flow rate of the wash buffer is about any of 0.1 column volumes/minute, 0.2 column volumes/minute, 0.3 column volumes/minute, 0.4 column volumes/minute, 0.5 column volumes/minute, 0.6 column volumes/minute, 0.7 column volumes/minute, 0.8 column volumes/minute, 0.9 column volumes/minute, 1 column volume/minute, 1.1 column volumes/minute, 1.2 column volumes/minute, 1.3 column volumes/minute, 1.4 column volumes/minute, 1.5 column volumes/minute, 1.6 column volumes/minute, 1.7 column volumes/minute, 1.8 column volumes/minute, 1.9 column volumes/minute, or 2 column volumes/minute. In some embodiments, the column volume refers to the volume occupied by the reversed-phase media within the solid phase extraction column or cartridge.

[0938] In some embodiments, the wash flow rate of the wash buffer is about 1 μL/minute to about 10 μL/minute, such as about 2 μL/minute to about 8 μL/minute, about 2 μL/minute to about 5 μL/minute, or about 2 μL/minute to about 4 μL/minute. In some embodiments, the wash flow rate of the wash buffer is about 10 L/minute or less, such as any of about 9 μL/minute or less, 8 μL/minute or less, 7 μL/minute or less, 6 μL/minute or less, 5 μL/minute or less, 4 μL/minute or less, 3 μL/minute or less, 2 μL/minute or less, or 1 μL/minute or less. In some embodiments, the wash flow rate of the wash buffer is about any of 1 μL/minute, 2 μL/minute, 3 μL/minute, 4 μL/minute, 5 μL/minute, 6 μL/minute, 7 μL/minute, 8 μL/minute, 9 μL/minute, or 10 μL/minute. In any of the embodiments above, the column volume is about 5 μL.

[0939] In some embodiments, the method comprises subjecting the reversed-phased medium comprising the associated proteolytic polypeptides to a wash buffer, wherein the total wash buffer applied to the reversed-phase medium is about 1 to about 50 column volumes. In some embodiments, the total wash buffer applied to the reversed-phase medium is about 50 or fewer, such as any of 45 or fewer, 40 or fewer, 35 or fewer, 30 or fewer, 25 or fewer, 20 or fewer, 15 or fewer, 10 or fewer, or 5 or fewer, column volumes.

d. Reversed-Phase Mediums of Solid Phase Extraction Columns

[0940] The methods provided herein, in certain aspects, involve solid phase extraction columns comprising a reversed-phase medium. Generally speaking, reversed-phase media comprise a relatively hydrophobic stationary phase configured to associate with proteolytic polypeptides, wherein relatively hydrophilic compounds, such as salts, reagents, or byproducts thereof present in a proteolytically digested sample, can be eluted from the reversed-phase medium prior to the proteolytic polypeptides using an aqueous mobile phase.

[0941] In some embodiments, the reversed-phase medium comprises an alkyl-based moiety covalently bound to a solid phase. In some embodiments, the alkyl-based moiety comprises an alkyl carbon functional group having between 1 carbon and 30 carbons, such as any of 4 carbons to 18 carbons, 8 carbons to 18 carbons, or 18 carbons to 30 carbons. In some embodiments, the alkyl-based moiety comprises an alkyl carbon functional group having 30 or fewer carbons, such as any of 25 or fewer carbons, 20 or fewer carbons, 19 or fewer carbons, 18 or fewer carbons, 17 or fewer carbons, 16 or fewer carbons, 15 or fewer carbons, 14 or fewer carbons, 13 or fewer carbons, 12 or fewer carbons, 11 or fewer carbons, 10 or fewer carbons, 9 or fewer carbons, 8 or fewer carbons, 7 or fewer carbons, 6 or fewer carbons, 5 or fewer carbons, 4 or fewer carbons. In some embodiments, the alkyl-based moiety comprises an alkyl carbon functional group comprising 4 carbons, 5 carbons, 6 carbons, 7 carbons, 8 carbons, 9 carbons, 10 carbons, 11 carbons, 12 carbons, 13 carbons, 14 carbons, 15 carbons, 16 carbons, 17 carbons, 18 carbons, 19 carbons, 20 carbons, 21 carbons, 22 carbons, 23 carbons, 24 carbons, 25 carbons, 26 carbons, 27 carbons, 28 carbons, 29 carbons, or 30 carbons. In some embodiments, the alkyl-based moiety comprises an octadecyl carbon functional group (C18) covalently bound to the solid phase. In some embodiments, the alkyl-based moiety comprises an octa carbon functional group (C8) covalently bound to the solid phase. In some embodiments, the carbon alkyl-based moiety comprises a tetra carbon functional group (C4) covalently bound to the solid phase.

[0942] In some embodiments, the reversed-phase medium comprises a silica-based material which supports an alkyl-based moiety. In some embodiments, the solid phase comprises a silica material. In some embodiments, the silica material is a silica gel, such as composed of a plurality of silica particles. In some embodiments, the silica-based material is inert. In some embodiments, the silica-based material is base-deactivated. In some embodiments, the silica-based material is an ultra-high purity silica material, such as an ultra-high purity silica gel. In some embodiments, the silica-based material comprises silanol groups that are partially or fully end-capped, such as, for example, with a C1 methyl group. In some embodiments, the silica-based material comprises silanol groups are not end-capped. The components of a silica-based material of a reversed-phase medium may take a diverse array of sizes and shapes. In some embodiments, the silica-based material comprises a plurality of particles, wherein the plurality of particles have an average largest cross-sectional distance (such as a diameter, e.g., as measured by dynamic light scattering) of about 0.5 μm to about 30 μm, such as any of about 1 μm to about 25 μm, about 15 μm to about 25 μm, about 18 μm to about 22 μm. In some embodiments, the silica-based material comprises a plurality of particles, wherein the plurality of particles have an average largest cross-sectional distance (such as a diameter, e.g., as measured by dynamic light scattering) of about any of 1 μm, 2 μm, 3 μm, 4 μm, 5 μm, 6 μm, 7 μm, 8 μm, 9 μm, 10 μm, 11 μm, 12 μm, 13 μm, 14 μm, 15 μm, 16 μm, 17 μm, 18 μm, 19 μm, 20 μm, 21 μm, 22 μm, 23 μm, 24 μm, 25 μm, 26 μm, 27 μm, 28 μm, 29 μm, or 30 μm.

[0943] In some embodiments, the silica-based material comprises a plurality of particles, wherein each particle of the plurality of particles comprises an average pore size of about 1 Å to about 500 Å, such as about 50 Å to about 300 Å, or about 100 Å to about 200 Å. In some embodiments, the silica-based material comprises a plurality of particles, wherein each particle of the plurality of particles comprises an average pore size of about any of 5 Å, 10 Å, 20 Å, 25 Å, 30 Å, 35 Å, 40 Å, 45 Å, 50 Å, 60 Å, 70 Å, 80 Å, 90 Å, 100 Å, 110 Å, 120 Å, 130 Å, 140 Å, 150 Å, 160 Å, 170 Å, 180 Å, 190 Å, 200 Å, 225 Å, 250 Å, 275 Å, 300 Å, 325 Å, 350 Å, 375 Å, 400 Å, 425 Å, 450 Å, 475 Å, or 500 Å. In some embodiments, the pore size of the silica-based medium is uniform or substantially uniform. In some embodiments, the pore size of the silica-based medium is heterogeneous. In some embodiments, the pores of the silica-based medium are derivatized with an alkyl-based moiety.

[0944] In some embodiments, the reversed-phase medium comprises a hydrophobic polymer material (e.g., RP-S). In some embodiments, the hydrophobic polymer material comprises a phenyl moiety. In some embodiments, the hydrophobic polymer material comprises a reaction product of divinylbenzene. In some embodiments, the hydrophobic polymer material comprises poly(styrene-co-divinylbenzene). In some embodiments the reversed-phase medium comprising a hydrophobic polymer material is in the form a plurality of particles. The components of a hydrophobic polymer material (e.g., RP-S) reversed-phase medium may take a diverse array of sizes and shapes. In some embodiments, the hydrophobic polymer material comprises a plurality of particles, wherein the plurality of particles have an average largest cross-sectional distance (such as a diameter, e.g., as measured by dynamic light scattering) of about 0.5 μm to about 30 μm, such as any of about 1 μm to about 25 μm, about 15 μm to about 25 μm, about 18 μm to about 22 μm. In some embodiments, the hydrophobic polymer material comprises a plurality of particles, wherein the plurality of particles have an average largest cross-sectional distance (such as a diameter, e.g., as measured by dynamic light scattering) of about any of 1 μm, 2 μm, 3 μm, 4 μm, 5 μm, 6 μm, 7 μm, 8 μm, 9 μm, 10 μm, 11 μm, 12 μm, 13 μm, 14 μm, 15 μm, 16 μm, 17 μm, 18 μm, 19 μm, 20 μm, 21 μm, 22 μm, 23 μm, 24 μm, 25 μm, 26 μm, 27 μm, 28 μm, 29 μm, or 30 μm. In some embodiments, the hydrophobic polymer material comprises a plurality of particles, wherein each particle of the plurality of particles comprises an average pore size of about 1 Å to about 500 Å, such as about 50 Å to about 300 Å, or about 100 Å to about 200 Å. In some embodiments, the hydrophobic polymer material comprises a plurality of particles, wherein each particle of the plurality of particles comprises an average pore size of about any of 5 Å, 10 Å, 20 Å, 25 Å, 30 Å, 35 Å, 40 Å, 45 Å, 50 Å, 60 Å, 70 Å, 80 Å, 90 Å, 100 Å, 110 Å, 120 Å, 130 Å, 140 Å, 150 Å, 160 Å, 170 Å, 180 Å, 190 Å, 200 Å, 225 Å, 250 Å, 275 Å, 300 Å, 325 Å, 350 Å, 375 Å, 400 Å, 425 Å, 450 Å, 475 Å, or 500 Å. In some embodiments, the pore size of the hydrophobic polymer material is uniform or substantially uniform. In some embodiments, the pore size of the hydrophobic polymer material is heterogeneous.

[0945] The reversed-phase media in the solid phase extraction columns may take a diverse array of forms. In some embodiments, the reversed-phase medium is in the form of a plurality of particles, wherein the solid phase extraction column comprises a packed column. In some embodiments, the solid phase extraction column comprises a surface modification forming the reversed-phase medium. In some embodiments, the solid phase extraction column comprises a monolithic structure. In some instances, the terms medium, media, and resin may be used interchangeably.

[0946] In some embodiments, the solid phase extraction column has a column volume of about 1 to about 10 μL, such as any of about 2 μL to about 8 μL, about 3 μL to about 7 μL, or about 4 μL to about 5 μL. In some embodiments, the solid phase extraction column has a column volume of about any of 1 μL, 2 μL, 3 μL, 4 μL, 5 μL, 6 μL, 7 μL, 8 μL, 9 μL, or 10 μL. The reversed-phase media can be referred to as a bed that is compacted within a chromatography column to form a bed volume.

[0947] In some embodiments, the reversed-phase medium comprises an alkyl-based moiety comprising an octadecyl carbon functional group (C18) covalently bound to a silica solid phase, wherein the silica solid phase comprises a plurality of particles having an average largest cross-sectional distance (such as a diameter, e.g., as measured by dynamic light scattering) of about 20 μm, and wherein the each particle of the plurality of particles comprises an average pore size of about 150 Å, and wherein the pores are derivatized with the alkyl-based moiety. In some embodiments, the solid phase extraction column comprising the reversed-phase medium has a column volume of about 5 μL. In some embodiments, the solid phase extraction column is an AssayMap 5 μL C18 cartridge (catalog no. 5190-6532; Agilent Technologies).

[0948] In some embodiments, the reversed-phase medium comprises an underivitized polystyrene divinylbenzene hydrophobic reversed-phase resin, wherein the polystyrene divinylbenzene hydrophobic reversed-phase resin comprises a plurality of particles having an average largest cross-sectional distance (such as a diameter, e.g., as measured by dynamic light scattering) of about 20 μm, and wherein each particle of the plurality of particles comprises an average pore size of about 100 Å. In some embodiments, the solid phase extraction column comprising the reversed-phase medium has a column volume of about 5 μL. In some embodiments, the solid phase extraction column is an AssayMAP 5 μL Reversed Phase (RP-S) cartridge (catalog no. G5496-60033; Agilent Technologies).

### II. HILIC Media-Based Techniques

[0949] Provided herein, in certain aspects, are methods of processing a proteolytic digest sample using a solid phase extraction column comprising a comprising a hydrophilic interaction liquid chromatography (HILIC) medium. As taught herein, the described methodology may be used for the enrichment of glycopolypeptides (e.g., a proteolytically digested glycopeptide), from a sample such as a proteolytic digest sample. In some embodiments, the resulting composition obtained from the methodology provided herein, or a derivative thereof, is suitable for use in a liquid chromatography-mass spectrometry (LC-MS) analysis, such as for the analysis of glycopolypeptides. In some embodiments, the enriched glycopeptide is a proteolytically digested glycopeptide. In some embodiments, the enriched glycopeptide is an endogenous glycopeptide. In some embodiments, the glycopeptide obtained from the method provided herein is enriched by a factor of at least 30 when compared to the polypeptide content in a respective proteolytic digest sample.

[0950] Aspects of the disclosure provided herein may be described via the state of the HILIC medium (e.g., dry state) when initiating loading of a HILIC load to a solid phase extraction column comprising a HILIC medium, and/or one or more conditions of the HILIC load, such as an amount of a plurality of proteolytically digested peptides relative to an amount of the HILIC medium in the solid phase extraction column and/or a concentration of an organic solvent of the HILIC load. In some embodiments, methodology is exemplified for obtaining the HILIC load having the one or more conditions. For purposes of orientation of aspects of the methodology provided herein, FIG. 26 illustrates an example workflow from a proteolytic digest sample to a LC-MS system. In some embodiments, the proteolytic digest sample resulting from a proteolytic digestion is not suitable for direct introduction to the LC-MS system (or it is not desirable to do so), such as due to conditions needed to facilitate reactions relevant to the proteolytic digestion (e.g., high salt and/or buffer content). As provided herein, in some embodiments, components of the proteolytic digest sample, such as a plurality of proteolytically digested peptides comprising at least one proteolytically digested glycopeptide, are subjected to a solid phase extraction column comprising a HILIC medium to associate the at least one proteolytically digested glycopeptide with the HILIC medium. The composition comprising the plurality of proteolytically digested peptides directly loaded onto the solid phase extraction column is referred to herein as a HILIC load (represented by the solid arrow in FIG. 26). In some embodiments, the methodology provided herein comprises loading a HILIC load having a specified condition (such as polypeptide amount relative to the amount of HILIC medium and/or concentration of an organic solvent) to a solid phase extraction column comprising a HILIC medium. In some embodiments, the proteolytic digest sample is subjected to one or more processing steps to form the HILIC load (represented by the dashed arrow in FIG. 26). As shown in FIG. 26, a HILIC eluate comprising the at least one glycopeptide is obtained from the solid phase extraction column. In some embodiments, the HILIC eluate is subjected to one or more processing steps in preparation for subjecting the at least one glycopeptide to the LC-MS system (represented by the dashed arrow in FIG. 26).

[0951] As described in certain aspects the instant application, in some embodiments, provided is a method for processing a proteolytic digest sample for use in a LC-MS analysis, wherein the proteolytic digest sample comprises a plurality of proteolytically digested peptides comprising at least one proteolytically digested glycopeptide, the method comprising loading a HILIC load derived from the proteolytic digest sample to a solid phase extraction column comprising a HILIC medium to associate the at least one proteolytically digested glycopeptide with the HILIC medium, wherein the loading of the HILIC load to the solid phase extraction column is initiated when the HILIC medium is in a dry state. As described in certain aspects the instant application, in some embodiments, provided is a method for processing a proteolytic digest sample for use in a LC-MS analysis, wherein the proteolytic digest sample comprises a plurality of proteolytically digested peptides comprising at least one proteolytically digested glycopeptide, the method comprising loading a HILIC load derived from the proteolytic digest sample to a solid phase extraction column comprising a HILIC medium to associate the at least one proteolytically digested glycopeptide with the HILIC medium, wherein the HILIC load loaded to the solid phase extraction column has an amount of the plurality of proteolytically digested peptides characterized by one or both of: (a) a ratio of the weight of the plurality of proteolytically digested peptides over the weight of the HILIC medium in the dry state of at least about 0.06; and/or (b) a ratio of the weight of the plurality of proteolytically digested peptides relative to the bed volume of the HILIC medium in the dry state of at least about 40 μg/μl. As described in certain aspects the instant application, in some embodiments, provided is a method for processing a proteolytic digest sample for use in a LC-MS analysis, wherein the proteolytic digest sample comprises a plurality of proteolytically digested peptides comprising at least one proteolytically digested glycopeptide, the method comprising loading a HILIC load derived from the proteolytic digest sample to a solid phase extraction column comprising a HILIC medium to associate the at least one proteolytically digested glycopeptide with the HILIC medium, wherein the HILIC load loaded to the solid phase extraction column has a concentration of an organic solvent of at least about 70% (v/v). As described in certain aspects the instant application, in some embodiments, provided is a method for processing a proteolytic digest sample for use in a LC-MS analysis, the method comprising any one or more combinations of the steps described herein.

[0952] In the following sections, additional description of the various aspects of the methods for processing a proteolytic digest sample is provided. Such description in a modular fashion is not intended to limit the scope of the disclosure, and based on the teachings provided herein one of ordinary skill in the art will readily appreciate that certain modules can be integrated, at least in part. The section heading used herein are for organizational purposes only and are not to be construed as limiting the subject matter described.

a. Dry State of HILIC Medium and HILIC Medium Characteristics

[0953] Provided herein, in some aspects, is a method for processing a proteolytic digest sample for use in a LC-MS analysis, the method comprising loading a HILIC load to a solid phase extraction column comprising a HILIC medium, wherein the loading of the HILIC load to the solid phase extraction column is initiated when the HILIC medium is in a dry state. One of ordinary skill in the art will readily appreciate that a HILIC medium will not remain in a dry state over the entire course of loading a HILIC load, i.e., the HILIC load will wet the HILIC medium over the course of applying the HILIC load to the HILIC medium. In some embodiments, the description of a dry state of a HILIC medium references the state of the HILIC medium immediately prior to a first portion of a HILIC load contacting the HILIC medium.

[0954] In some embodiments, the dry state of a HILIC medium is characterized by the HILIC medium comprising less than about 5% (v/v), such as less than about any of 4.5% (v/v), 4% (v/v), 3.5% (v/v), 3% (v/v), 2.5% (v/v), 2% (v/v), 1.5% (v/v), 1% (v/v), 0.5% (v/v), or 0.1% (v/v), of a liquid at the initiation of the loading of a HILIC load to a solid phase extraction column comprising the HILIC medium. In some embodiments, the HILIC medium is substantially dry, such as does contain a liquid in a measurable amount, such as above the level of liquid in surrounding air, e.g., as based on humidity. In some embodiments, the liquid comprises water.

[0955] In some embodiments, at the initiation of the loading of a HILIC load to a HILIC medium, the HILIC medium has not been subjected to a washing, equilibration, or wetting procedure. It is appreciated that in some embodiments, the HILIC medium may have been subjected to a liquid such as during manufacturing or packaging, and in certain aspects the present description regarding a dry state is focused on steps that occur after the HILIC medium is loaded into a cartridge to form the solid phase extraction column and dried (or a occur after a final drying step and prior to loading a HILIC load). For example, in some embodiments, the method comprises obtaining a solid phase extraction column comprising a HILIC medium, such as from a manufacturer, and loading a HILIC load to the solid phase extraction column without intervening steps of introducing a liquid to the solid phase extraction column, such as for purposes of a washing, equilibration, or wetting procedure. In some embodiments, at the initiation of the loading of a HILIC load to a HILIC medium, the HILIC medium is not in an equilibrated state. In some embodiments, at the initiation of the loading of a HILIC load to a HILIC medium, the HILIC medium is not in a wetted state. In some embodiments, at the initiation of the loading of a HILIC load to a HILIC medium, the HILIC medium is not in a swelled state. In some embodiments, at the initiation of the loading of a HILIC load to a HILIC medium, the HILIC medium is not in a hydrated state. In some embodiments, the HILIC medium may be subjected to a liquid, such as a washing liquid, and then subsequently dried, wherein at the initiation of the loading of a HILIC load to the HILIC medium, the HILIC load is in a dry state.

[0956] In some embodiments, at the initiation of the loading of a HILIC load on a HILIC medium, the HILIC medium is not equilibrated with an equilibration liquid. In some embodiments, at the initiation of the loading of a HILIC load on a HILIC medium, the HILIC medium is not washed with a wash liquid. In some embodiments, at the initiation of the loading of a HILIC load on a HILIC medium, the HILIC medium is not wetted with a wetting liquid. In some embodiments, during the loading of the HILIC load, the HILIC medium is hydrated with water and then binds to at least one glycopeptide, wherein the HILIC load includes both water and an organic miscible solvent.

[0957] In some embodiments, the method provided herein comprises drying a HILIC medium of a solid phase extraction column to obtain the HILIC medium in a dry state. In some embodiments, the drying comprises subjecting a solid phase extraction column, or a HILIC medium, to conditions such that a liquid in the solid phase extraction column of the HILIC medium can leave the solid phase extraction column. In some embodiments, the condition comprises a room temperature. In some embodiments, the condition comprises an elevate temperature. In some embodiments, the method comprises determining the liquid content of a HILIC medium to assess if it is in a dry state prior to loading a HILIC load to a solid phase extraction column comprising the HILIC medium. In some embodiments, drying a HILIC medium of a solid phase extraction column may comprises use of a force to push liquid through the solid phase extraction column, such as a centrifugal force, position pressure, and/or negative pressure.

[0958] In other aspects of the description provided herein, the HILIC medium need not be in a dry state at the initiation of the loading of the HILIC load to the solid phase extraction column. For example, in some embodiments, the solid phase extraction column is equilibrated, wetted, and/or washed prior to loading a HILIC load to the solid phase extraction column, such as according to manufacturer's instructions. In some embodiments, wherein a HILIC medium is not in a dry state, loading a HILIC load to a solid phase extraction column comprising the HILIC medium is characterized by one or more of: (1) the HILIC load loaded to the solid phase extraction column has an amount of the plurality of proteolytically digested peptides characterized by one or both of: (a) a ratio of the weight of the plurality of proteolytically digested peptides over the weight of the HILIC medium in the dry state of at least about 0.06; and/or (b) a ratio of the weight of the plurality of proteolytically digested peptides relative to the bed volume of the HILIC medium in the dry state of at least about 40 μg/μl; or (2) the HILIC load loaded to the solid phase extraction column has a concentration of an organic solvent of at least about 70% (v/v).

[0959] In some embodiments, the HILIC medium comprises a solid phase. In some embodiments, the HILIC medium comprises a solid phase comprising a polar functional moiety. In some embodiments, the solid phase comprises a silica material. In some embodiments, the polar functional moiety comprises one or more of an amino group, a cyano group, a carbamoyl group, an aminoalkyl group, alkylamide group, or a combination thereof. In some embodiments, the HILIC medium comprises an amide resin (e.g., Tosoh TSK-Gel Amide 80 Resin). In some embodiments, the HILIC medium comprises silica particles covalently bonded with carbamoyl groups. In some embodiments, the HILIC medium comprises 2 μm, 3 μm, 5 μm, or 10 μm silica particles of covalently bonded with carbamoyl groups, see, e.g., Y. Kawachi et al., J Chromatography A, 2011, which is incorporated herein by reference in its entirety. In some embodiments, the solid phase extraction column comprises about 0.5 mg to about 5 mg, including about any of 1 mg, 1.5 mg, 2 mg, 2.5 mg, 3 mg, 3.5 mg, 4 mg, or 4.5 mg, of a HILIC medium in a dry state. In some embodiments, the solid phase extraction column comprises a bed volume of a HILIC medium in a dry state of about 2.5 μl to about 7.5 μl, including about 5 μl. In some embodiments, the solid phase extraction column comprises about 2.5 mg to about 3.5 mg, including about 3 mg, of a HILIC medium in a dry state, a bed volume of the HILIC medium in a dry state of about 4 μl to about 6 μl, including about 5 μl, and wherein the HILIC medium comprises silica particles covalently bonded with carbamoyl groups. In some embodiments, the solid phase extraction column is a GlykoPrep Cleanup cartridge (e.g., Product code: GS96-CU; WS0263).

[0960] HILIC is used primarily for the separation of polar and hydrophilic compounds such as, for example, glycopeptides. HILIC stationary phases are polar and tend to bind hydrophilic compounds like glycopeptides. Typical mobile phases are aqueous buffers with organic modifiers such as acetonitrile. It is believed that the aqueous content of the liquid passing through the phase creates a water rich layer on the surface of the stationary phase. This allows for partitioning of solutes between the more organic mobile phase and the aqueous layer. Liquid with a higher proportion of organic solvent passing through the HILIC phase tends to cause polar compounds to partition into the aqueous layer on the HILIC medium. In contrast, liquid with a lower proportion of organic solvent passing through the HILIC phase tends to cause polar compounds to partition out of the aqueous layer and into the passing liquid.

b. HILIC Loads and Methods of Making

[0961] Provided herein, in some aspects, is a method for processing a proteolytic digest sample for use in a LC-MS analysis, the method comprising loading a HILIC load to a solid phase extraction column comprising a HILIC medium, wherein the HILIC load comprises: (a) an amount of the plurality of proteolytically digested peptides characterized by one or both of: (i) a ratio of the weight of the plurality of proteolytically digested peptides over the weight of the HILIC medium in the dry state of at least about 0.05, including at least about 0.06; and/or (ii) a ratio of the weight of the plurality of proteolytically digested peptides relative to the bed volume of the HILIC medium in the dry state of at least about 30 μg/μl, including at least about 40 μg/μl; and/or (b) a concentration of an organic solvent of at least about 70% (v/v). Also provided herein are methodologies for making the HILIC load having: (a) an amount of the plurality of proteolytically digested peptides characterized by one or both of: (i) a ratio of the weight of the plurality of proteolytically digested peptides over the weight of the HILIC medium in the dry state of at least about 0.05, including at least about 0.06; and/or (ii) a ratio of the weight of the plurality of proteolytically digested peptides relative to the bed volume of the HILIC medium in the dry state of at least about 30 μg/μl, including at least about 40 μg/μl; and/or (b) a concentration of an organic solvent of at least about 70% (v/v). For example, in some embodiments, the methods provided herein comprise: (a) obtaining a proteolytic digest sample; (b) removing a liquid content of the proteolytic digest sample; and (c) reconstituting the proteolytic digest sample to produce the HILIC load such that the HILIC load comprises: (A) an amount of the plurality of proteolytically digested peptides characterized by one or both of: (i) a ratio of the weight of the plurality of proteolytically digested peptides over the weight of the HILIC medium in the dry state of at least about 0.05, including at least about 0.06; and/or (ii) a ratio of the weight of the plurality of proteolytically digested peptides relative to the bed volume of the HILIC medium in the dry state of at least about 30 μg/μl, including at least about 40 μg/μl; and/or (b) a concentration of an organic solvent of at least about 70% (v/v).

[0962] In some embodiments, the HILIC load loaded to a solid phase extraction column has an amount of the plurality of proteolytically digested peptides characterized by a ratio of the weight of the plurality of proteolytically digested peptides over the weight of the HILIC medium in the dry state of about 0.05 to about 0.5, such as any of about 0.05 to about 0.35, about 0.05 to about 0.15, about 0.05 to about 0.25, or about 0.15 to about 0.25. In some embodiments, the HILIC load loaded to a solid phase extraction column has an amount of the plurality of proteolytically digested peptides characterized by a ratio of the weight of the plurality of proteolytically digested peptides over the weight of the HILIC medium in the dry state of at least about 0.05, such as at least about any of 0.06, 0.07, 0.08, 0.09, 0.1, 0.11, 0.12, 0.13, 0.14, 0.15, 0.16, 0.17, 0.18, 0.19, 0.20, 0.21, 0.22, 0.23, 0.24, 0.25, 0.26, 0.27, 0.28, 0.29, 0.30, 0.31, 0.32, 0.33, 0.34, or 0.35. In some embodiments, the HILIC load loaded to a solid phase extraction column has an amount of the plurality of proteolytically digested peptides characterized by a ratio of the weight of the plurality of proteolytically digested peptides over the weight of the HILIC medium in the dry state is about any of 0.05, 0.06, 0.07, 0.08, 0.09, 0.1, 0.11, 0.12, 0.13, 0.14, 0.15, 0.16, 0.17, 0.18, 0.19, 0.20, 0.21, 0.22, 0.23, 0.24, 0.25, 0.26, 0.27, 0.28, 0.29, 0.30, 0.31, 0.32, 0.33, 0.34, or 0.35. In some embodiments, the HILIC load loaded to a solid phase extraction column has an amount of the plurality of proteolytically digested peptides characterized by a ratio of the weight of the plurality of proteolytically digested peptides over the weight of the HILIC medium in the dry state of at least about 0.1, including about 0.1. In some embodiments, the HILIC load loaded to a solid phase extraction column has an amount of the plurality of proteolytically digested peptides characterized by a ratio of the weight of the plurality of proteolytically digested peptides over the weight of the HILIC medium in the dry state of at least about 0.2, including about 0.2. In any of the embodiments herein, the HILIC medium in the dry state has a weight of about 3 mg. In any of the embodiments herein, the HILIC medium in the dry state has a bed volume of about 5 μL. In some embodiments, the HILIC medium comprises silica particles covalently bonded with carbamoyl groups. In some embodiments, the solid phase extraction column comprises about 2.5 mg to about 3.5 mg, including about 3 mg, of a HILIC medium in a dry state, a bed volume of the HILIC medium in a dry state of about 4 μl to about 6 μl, including about 5 μl, and wherein the HILIC medium comprises silica particles covalently bonded with carbamoyl groups. In some embodiments, the solid phase extraction column is a GlykoPrep Cleanup cartridge (e.g., Product code: GS96-CU; WS0263).

[0963] In some embodiments, the HILIC load loaded to the solid phase extraction column has an amount of the plurality of proteolytically digested peptides characterized by a ratio of the weight of the plurality of proteolytically digested peptides relative to the bed volume of the HILIC medium in the dry state of about 30 μg/μl to about 200 μg/μl, such any of about 50 μg/μl to about 130 μg/μl, about 55 μg/μl to about 65 μg/μl, about 110 μg/μl to about 130 μg/μl, or about 115 μg/μl to about 125 μg/μl. In some embodiments, the HILIC load loaded to the solid phase extraction column has an amount of the plurality of proteolytically digested peptides characterized by a ratio of the weight of the plurality of proteolytically digested peptides relative to the bed volume of the HILIC medium in the dry state of at least about 30 μg/μl, such as at least about any of 35 μg/μl, 40 μg/μl, 45 μg/μl, 50 μg/μl, 55 μg/μl, 60 μg/μl, 65 μg/μl, 70 μg/μl, 75 μg/μl, 80 μg/μl, 85 μg/μl, 90 μg/μl, 95 μg/μl, 100 μg/μl, 105 μg/μl, 110 μg/μl, 115 μg/μl, 120 μg/μl, 125 μg/μl, 130 μg/μl, 135 μg/μl, 140 μg/μl, 145 μg/μl, 150 μg/μl, 155 μg/μl, 160 μg/μl, 165 μg/μl, 170 μg/μl, 175 μg/μl, 180 μg/μl, 185 μg/μl, 190 μg/μl, 195 μg/μl, or 200 μg/μl. In some embodiments, the HILIC load loaded to the solid phase extraction column has an amount of the plurality of proteolytically digested peptides characterized by a ratio of the weight of the plurality of proteolytically digested peptides relative to the bed volume of the HILIC medium in the dry state of about any of 30 μg/μl, 35 μg/μl, 40 μg/μl, 45 μg/μl, 50 μg/μl, 55 μg/μl, 60 μg/μl, 65 μg/μl, 70 μg/μl, 75 μg/μl, 80 μg/μl, 85 μg/μl, 90 μg/μl, 95 μg/μl, 100 μg/μl, 105 μg/μl, 110 μg/μl, 115 μg/μl, 120 μg/μl, 125 μg/μl, 130 μg/μl, 135 μg/μl, 140 μg/μl, 145 μg/μl, 150 μg/μl, 155 μg/μl, 160 μg/μl, 165 μg/μl, 170 μg/μl, 175 μg/μl, 180 μg/μl, 185 μg/μl, 190 μg/μl, 195 μg/μl, or 200 μg/μl. In some embodiments, the HILIC load loaded to the solid phase extraction column has an amount of the plurality of proteolytically digested peptides characterized by a ratio of the weight of the plurality of proteolytically digested peptides relative to the bed volume of the HILIC medium in the dry state of at least about 60 μg/μl, including about 60 μg/μl. In some embodiments, the HILIC load loaded to the solid phase extraction column has an amount of the plurality of proteolytically digested peptides characterized by a ratio of the weight of the plurality of proteolytically digested peptides relative to the bed volume of the HILIC medium in the dry state of at least about 120 μg/μl, including about 120 μg/μl. In any of the embodiments herein, the HILIC medium in the dry state has a weight of about 3 mg. In any of the embodiments herein, the HILIC medium in the dry state has a bed volume of about 5 μL. In some embodiments, the HILIC medium comprises silica particles covalently bonded with carbamoyl groups. In some embodiments, the solid phase extraction column comprises about 2.5 mg to about 3.5 mg, including about 3 mg, of a HILIC medium in a dry state, a bed volume of the HILIC medium in a dry state of about 4 μl to about 6 μl, including about 5 μl, and wherein the HILIC medium comprises silica particles covalently bonded with carbamoyl groups. In some embodiments, the solid phase extraction column is a GlykoPrep Cleanup cartridge (e.g., Product code: GS96-CU; WS0263).

[0964] In some embodiments, the HILIC load loaded to a solid phase extraction column has an amount of the plurality of proteolytically digested peptides characterized by a ratio of the weight of the plurality of proteolytically digested peptides over the weight of the HILIC medium in the dry state of about 0.05 to about 0.5, such as any of about 0.05 to about 0.35, about 0.05 to about 0.15, about 0.05 to about 0.25, or about 0.15 to about 0.25, and characterized by a ratio of the weight of the plurality of proteolytically digested peptides relative to the bed volume of the HILIC medium in the dry state of about 30 μg/μl to about 200 μg/μl, such any of about 50 μg/μl to about 130 μg/μl, about 55 μg/μl to about 65 μg/μl, about 110 μg/μl to about 130 μg/μl, or about 115 μg/μl to about 125 μg/μl. In some embodiments, the HILIC load loaded to a solid phase extraction column has an amount of the plurality of proteolytically digested peptides characterized by a ratio of the weight of the plurality of proteolytically digested peptides over the weight of the HILIC medium in the dry state of at least about 0.05, such as at least about any of 0.06, 0.07, 0.08, 0.09, 0.1, 0.11, 0.12, 0.13, 0.14, 0.15, 0.16, 0.17, 0.18, 0.19, 0.20, 0.21, 0.22, 0.23, 0.24, 0.25, 0.26, 0.27, 0.28, 0.29, 0.30, 0.31, 0.32, 0.33, 0.34, or 0.35, and characterized by a ratio of the weight of the plurality of proteolytically digested peptides relative to the bed volume of the HILIC medium in the dry state of at least about 30 μg/μl, such as at least about any of 35 μg/μl, 40 μg/μl, 45 μg/μl, 50 μg/μl, 55 μg/μl, 60 μg/μl, 65 μg/μl, 70 μg/μl, 75 μg/μl, 80 μg/μl, 85 μg/μl, 90 μg/μl, 95 μg/μl, 100 μg/μl, 105 μg/μl, 110 μg/μl, 115 μg/μl, 120 μg/μl, 125 μg/μl, 130 μg/μl, 135 μg/μl, 140 μg/μl, 145 μg/μl, 150 μg/μl, 155 μg/μl, 160 μg/μl, 165 μg/μl, 170 μg/μl, 175 μg/μl, 180 μg/μl, 185 μg/μl, 190 μg/μl, 195 μg/μl, or 200 μg/μl. In some embodiments, the HILIC load loaded to a solid phase extraction column has an amount of the plurality of proteolytically digested peptides characterized by a ratio of the weight of the plurality of proteolytically digested peptides over the weight of the HILIC medium in the dry state is about any of 0.05, 0.06, 0.07, 0.08, 0.09, 0.1, 0.11, 0.12, 0.13, 0.14, 0.15, 0.16, 0.17, 0.18, 0.19, 0.20, 0.21, 0.22, 0.23, 0.24, 0.25, 0.26, 0.27, 0.28, 0.29, 0.30, 0.31, 0.32, 0.33, 0.34, or 0.35, and characterized by a ratio of the weight of the plurality of proteolytically digested peptides relative to the bed volume of the HILIC medium in the dry state of about any of 30 μg/μl, 35 μg/μl, 40 μg/μl, 45 μg/μl, 50 μg/μl, 55 μg/μl, 60 μg/μl, 65 μg/μl, 70 μg/μl, 75 μg/μl, 80 μg/μl, 85 μg/μl, 90 μg/μl, 95 μg/μl, 100 μg/μl, 105 μg/μl, 110 μg/μl, 115 μg/μl, 120 μg/μl, 125 μg/μl, 130 μg/μl, 135 μg/μl, 140 μg/μl, 145 μg/μl, 150 μg/μl, 155 μg/μl, 160 μg/μl, 165 μg/μl, 170 μg/μl, 175 μg/μl, 180 μg/μl, 185 μg/μl, 190 μg/μl, 195 μg/μl, or 200 μg/μl. In some embodiments, the HILIC load loaded to a solid phase extraction column has an amount of the plurality of proteolytically digested peptides characterized by a ratio of the weight of the plurality of proteolytically digested peptides over the weight of the HILIC medium in the dry state of at least about 0.1, including about 0.1, and characterized by a ratio of the weight of the plurality of proteolytically digested peptides relative to the bed volume of the HILIC medium in the dry state of at least about 60 μg/μl, including about 60 μg/μl. In some embodiments, the HILIC load loaded to a solid phase extraction column has an amount of the plurality of proteolytically digested peptides characterized by a ratio of the weight of the plurality of proteolytically digested peptides over the weight of the HILIC medium in the dry state of at least about 0.2, including about 0.2, and characterized by a ratio of the weight of the plurality of proteolytically digested peptides relative to the bed volume of the HILIC medium in the dry state of at least about 120 μg/μl, including about 120 μg/μl. In any of the embodiments herein, the HILIC medium in the dry state has a weight of about 3 mg. In any of the embodiments herein, the HILIC medium in the dry state has a bed volume of about 5 μL. In some embodiments, the HILIC medium comprises silica particles covalently bonded with carbamoyl groups. In some embodiments, the solid phase extraction column comprises about 2.5 mg to about 3.5 mg, including about 3 mg, of a HILIC medium in a dry state, a bed volume of the HILIC medium in a dry state of about 4 μl to about 6 μl, including about 5 μl, and wherein the HILIC medium comprises silica particles covalently bonded with carbamoyl groups. In some embodiments, the solid phase extraction column is a GlykoPrep Cleanup cartridge (e.g., Product code: GS96-CU; WS0263).

[0965] In some embodiments, the HILIC load has an amount of a plurality of proteolytically digested peptides of about 150 μg to about 1,000 μg, such as any of about 200 μg to about 800 μg, about 200 μg to about 600 μg, about 250 μg to about 650 μg, or about 300 μg to about 600 μg. In some embodiments, the HILIC load has an amount of a plurality of proteolytically digested peptides of at least about 150 μg, such as at least about any of 150 μg, 200 μg, 250 μg, 300 μg, 350 μg, 400 μg, 450 μg, 500 μg, 550 μg, 600 μg, 650 μg, 700 μg, 750 μg, 800 μg, 850 μg, 900 μg, 950 μg, or 1,000 μg. In some embodiments, the HILIC load has an amount of a plurality of proteolytically digested peptides of about 200 μg or more, such as about any of 250 μg or more, 300 μg or more, 350 μg or more, 400 μg or more, 450 μg or more, 500 μg or more, 550 μg or more, 600 μg or more, 650 μg or more, 700 μg or more, 750 μg or more, 800 μg or more, 850 μg or more, 900 μg or more, 950 μg or more, or 1,000 μg or more.

[0966] In some embodiments, the HILIC load has an amount of a plurality of proteolytically digested peptides of about 150 μg to about 1,000 μg, such as any of about 200 μg to about 800 μg, about 200 μg to about 600 μg, about 250 μg to about 650 μg, or about 300 μg to about 600 μg, wherein the solid phase extraction column comprises about 2.5 mg to about 3.5 mg, including about 3 mg, of a HILIC medium in a dry state, a bed volume of the HILIC medium in a dry state of about 4 μl to about 6 μl, including about 5 μl, and wherein the HILIC medium comprises silica particles covalently bonded with carbamoyl groups. In some embodiments, the HILIC load has an amount of a plurality of proteolytically digested peptides of at least about 150 μg, such as at least about any of 150 μg, 200 μg, 250 μg, 300 μg, 350 μg, 400 μg, 450 μg, 500 μg, 550 μg, 600 μg, 650 μg, 700 μg, 750 μg, 800 μg, 850 μg, 900 μg, 950 μg, or 1,000 μg, wherein the solid phase extraction column comprises about 2.5 mg to about 3.5 mg, including about 3 mg, of a HILIC medium in a dry state, a bed volume of the HILIC medium in a dry state of about 4 μl to about 6 μl, including about 5 μl, and wherein the HILIC medium comprises silica particles covalently bonded with carbamoyl groups. In some embodiments, the HILIC load has an amount of a plurality of proteolytically digested peptides of about 200 μg or more, such as about any of 250 μg or more, 300 μg or more, 350 μg or more, 400 μg or more, 450 μg or more, 500 μg or more, 550 μg or more, 600 μg or more, 650 μg or more, 700 μg or more, 750 μg or more, 800 μg or more, 850 μg or more, 900 μg or more, 950 μg or more, or 1,000 μg or more, wherein the solid phase extraction column comprises about 2.5 mg to about 3.5 mg, including about 3 mg, of a HILIC medium in a dry state, a bed volume of the HILIC medium in a dry state of about 4 μl to about 6 μl, including about 5 μl, and wherein the HILIC medium comprises silica particles covalently bonded with carbamoyl groups. In some embodiments, the solid phase extraction column is a GlykoPrep Cleanup cartridge (e.g., Product code: GS96-CU; WS0263).

[0967] Polypeptide amounts described herein may be absolute or estimated amounts. In some embodiments, the amount of polypeptide content in any sample, or a derivative thereof, is a measured directly from said sample, or the derivative thereof, e.g., using a BCA quantification assay or a UV-VIS measurement at 280 nm. In some embodiments, the amount of polypeptide content in a sample, or a derivative thereof, is estimated based on a known, including reference standard, value for polypeptide content in the sample based on the origin of the sample, e.g., such as based on a known standard polypeptide concentration in human plasma or serum.

[0968] In some embodiments, provided is a method for processing a proteolytic digest sample for use in a LC-MS analysis, the method comprising loading a HILIC load to a solid phase extraction column comprising a HILIC medium, wherein the HILIC load comprises a concentration of an organic solvent of at least about 70% (v/v), such as at least about any of 71% (v/v), 72% (v/v), 73% (v/v), 74% (v/v), 75% (v/v), 76% (v/v), 77% (v/v), 78% (v/v), 79% (v/v), 80% (v/v), 81% (v/v), 82% (v/v), 83% (v/v), 84% (v/v), 85% (v/v), 86% (v/v), 87% (v/v), 88% (v/v), 89% (v/v), 90% (v/v), 91% (v/v), 92% (v/v), 93% (v/v), 94% (v/v), 95% (v/v), 96% (v/v), 97% (v/v), 98% (v/v), or 99% (v/v). In some embodiments, the HILIC load comprises a concentration of an organic solvent of about any of 70% (v/v), 71% (v/v), 72% (v/v), 73% (v/v), 74% (v/v), 75% (v/v), 76% (v/v), 77% (v/v), 78% (v/v), 79% (v/v), 80% (v/v), 81% (v/v), 82% (v/v), 83% (v/v), 84% (v/v), 85% (v/v), 86% (v/v), 87% (v/v), 88% (v/v), 89% (v/v), 90% (v/v), 91% (v/v), 92% (v/v), 93% (v/v), 94% (v/v), 95% (v/v), 96% (v/v), 97% (v/v), 98% (v/v), 99% (v/v), or 100% (v/v).

[0969] In some embodiments, the organic solvent comprises an aprotic solvent miscible in water. In some embodiments, the organic solvent is selected from the group consisting of acetonitrile, ethanol, methanol, tetrahydrofuran, and dioxane, or a combination thereof. In some embodiments, the organic solvent comprises acetonitrile (ACN). In some embodiments, the organic solvent is ACN.

[0970] In some embodiments, provided is a method for processing a proteolytic digest sample for use in a LC-MS analysis, the method comprising loading a HILIC load to a solid phase extraction column comprising a HILIC medium, wherein the HILIC load comprises a concentration of ACN of at least about 70% (v/v), such as at least about any of 71% (v/v), 72% (v/v), 73% (v/v), 74% (v/v), 75% (v/v), 76% (v/v), 77% (v/v), 78% (v/v), 79% (v/v), 80% (v/v), 81% (v/v), 82% (v/v), 83% (v/v), 84% (v/v), 85% (v/v), 86% (v/v), 87% (v/v), 88% (v/v), 89% (v/v), 90% (v/v), 91% (v/v), 92% (v/v), 93% (v/v), 94% (v/v), 95% (v/v), 96% (v/v), 97% (v/v), 98% (v/v), or 99% (v/v). In some embodiments, the HILIC load comprises a concentration of ACN of about any of 70% (v/v), 71% (v/v), 72% (v/v), 73% (v/v), 74% (v/v), 75% (v/v), 76% (v/v), 77% (v/v), 78% (v/v), 79% (v/v), 80% (v/v), 81% (v/v), 82% (v/v), 83% (v/v), 84% (v/v), 85% (v/v), 86% (v/v), 87% (v/v), 88% (v/v), 89% (v/v), 90% (v/v), 91% (v/v), 92% (v/v), 93% (v/v), 94% (v/v), 95% (v/v), 96% (v/v), 97% (v/v), 98% (v/v), 99% (v/v), or 100% (v/v). In some embodiments, the HILIC load comprises a concentration of ACN of about 80% (v/v).

[0971] In some aspects of the methods provided herein, the method comprises one or more steps for obtaining, such as making, a HILIC load. In some embodiments, the HILIC load comprises: (a) an amount of the plurality of proteolytically digested peptides characterized by one or both of: (i) a ratio of the weight of the plurality of proteolytically digested peptides over the weight of the HILIC medium in the dry state of at least about 0.05; and/or (ii) a ratio of the weight of the plurality of proteolytically digested peptides relative to the bed volume of the HILIC medium in the dry state of at least about 30 μg/μl, including such HILIC load in a set volume, e.g., about 220 μl or less; and/or (b) a concentration of an organic solvent of at least about 70% (v/v). In some embodiments, the proteolytic digest sample, such as resulting from a tryptic digestion, is of a different constitution than a HILIC load used in the methods described herein, such as HILIC load comprising (a) an amount of the plurality of proteolytically digested peptides characterized by one or both of: (i) a ratio of the weight of the plurality of proteolytically digested peptides over the weight of the HILIC medium in the dry state of at least about 0.05; and/or (ii) a ratio of the weight of the plurality of proteolytically digested peptides relative to the bed volume of the HILIC medium in the dry state of at least about 30 μg/μl; and/or (b) a concentration of an organic solvent of at least about 70% (v/v). In such embodiments, encompassed herein are method steps for processing a proteolytic digest sample to form a HILIC load. In some embodiments, the methods provided herein comprise: (a) obtaining a proteolytic digest sample; (b) removing a liquid content of the proteolytic digest sample; and (c) reconstituting the proteolytic digest sample to produce the HILIC load such that the HILIC load comprises: (A) an amount of the plurality of proteolytically digested peptides characterized by one or both of: (i) a ratio of the weight of the plurality of proteolytically digested peptides over the weight of the HILIC medium in the dry state of at least about 0.05; and/or (ii) a ratio of the weight of the plurality of proteolytically digested peptides relative to the bed volume of the HILIC medium in the dry state of at least about 30 μg/μl, including such HILIC load in a set volume, e.g., about 220 μl or less; and/or (B) a concentration of an organic solvent of at least about 70% (v/v).

[0972] In some embodiments, obtaining the HILIC load comprises reducing (such as removing) a liquid content from a proteolytic digest sample, such as resulting from a tryptic digestion, without substantial loss of a plurality of proteolytically digested peptides in the proteolytic digest sample. In some embodiments, the HILIC load comprises at least about 70%, 80%, or 90%, such as at least about any of 91%, 92%, 93%, 94%, 95%, 96%, 97%, 99%, or 100%, of a plurality of proteolytically digested peptides as compared to a proteolytic digest sample from which the HILIC load is obtained. In some embodiments, the reducing (such as removing) the liquid content from the proteolytic digested sample comprises performing a peptide concentrating technique with the proteolytically digested sample to obtain a precursor of the HILIC load such that (a) the precursor can be reconstituted with a reconstitution liquid comprising the organic solvent to obtain the HILIC load having a volume of 220 μL or less and a concentration of the organic solvent of at least about 70% (v/v); and (b) the resulting HILIC load comprises an amount of the plurality of proteolytically digested peptides of at least about 200 μg.

[0973] In some embodiments, the method comprises reducing a liquid content from the proteolytic digest sample to form a dried proteolytic digest sample; and reconstituting the dried proteolytic digest sample with a reconstitution liquid comprising the organic solvent to produce the HILIC load such that (a) the HILIC load has a volume of about 220 μL or less and a concentration of the organic solvent of at least about 70% (v/v); and (b) the HILIC load has an amount of the plurality of proteolytic peptides of at least about 200 μg.

[0974] In some embodiments, the reconstituting the dried proteolytic digest sample comprises: mixing the dried proteolytic digest sample with an amount of water to form a water mixture: sonicating the water mixture with a sonicator; mixing the water mixture with an amount of trifluoracetic acid (TFA) and acetonitrile (ACN), wherein the amount of TFA and ACN are such that the final concentration of TFA is about 1% (v/v) and the final concentration of ACN is about 80% (v/v); and sonicating the water mixture having the amount of TFA and ACN with a sonicator to produce the HILIC load. In some embodiments, the sonicating the water mixture with the sonicator comprises a water-based dissolution cycle, wherein the water-based dissolution cycle is repeated about 2 times to about 5 times, and wherein for each of the water-based dissolution cycles, the sonicating the water mixture is performed for about 5 minutes and a water reservoir of the sonicator is configured with ice to cool the water reservoir. In some embodiments, the sonicating the water mixture having the amount of TFA and ACN with the sonicator comprises an organic-based dissolution cycle, wherein the organic-based dissolution cycle is repeated about 2 times to about 3 times, and wherein for each of the organic-based dissolution cycles, the sonicating is performed for about 4 minutes and a water reservoir of the sonicator is configured with ice to cool the water reservoir.

[0975] In some embodiments, wherein the reducing (such as removing) the liquid content from the proteolytic digest sample comprises removing all or substantially all of the liquid content therefrom. In some embodiments, the peptide concentrating technique comprises a vacuum evaporation technique or a lyophilization technique. In some embodiments, the peptide concentrating technique comprises a SpeedVac.

[0976] In some embodiments, the proteolytic digest sample having reduced liquid content, such as a dried proteolytic digest sample, is reconstituted with one or more liquids. In some embodiments, the one or more liquids comprise one or more of water, TFA, ACN, or any combination thereof. In some embodiments, the dried proteolytic digest sample is reconstituted in stages, such as a first stage with water and a second stage with TFA and ACN, such that a HILIC load is obtained as described herein. In some embodiments, the volume of the HILIC load is about 10 μL to about 1 mL, such as about 100 to about 500 μL, about 50 μL to about 220 μL, or about 100 to about 220 μL. In some embodiments, the volume of the HILIC load is about 220 μL or less, such as about 210 μL or less, 200 μL or less, 190 μL or less, 180 μL or less, 170 μL or less, 160 μL or less, 150 μL or less, 140 μL or less, 130 μL or less, 120 μL or less, 110 μL or less, 100 μL or less, 90 μL or less, 80 μL or less, 70 μL or less, 60 μL or less, or 50 μL or less.

c. Additional Aspects of the Methods for Processing a Proteolytic Digest Sample

[0977] In certain aspects, the method provided herein comprises one or more additional steps involved with processing a proteolytic digest sample taught herein.

[0978] In some embodiments, the method comprises performing a washing step after loading a HILIC load to a solid phase extraction column comprising a HILIC medium and prior to subjecting the HILIC medium to n elution liquid, wherein the washing step comprises subjecting the HILIC medium to a wash liquid. In some embodiments, the wash liquid comprises an organic solvent at a concentration of at least about 90% (v/v), such as at least about 91% (v/v), 92% (v/v), 93% (v/v), 94% (v/v), 95% (v/v), 96% (v/v), 97% (v/v), 98% (v/v), or 99% (v/v). In some embodiments, the organic solvent is ACN. In some embodiments, the wash liquid further comprises TFA at a concentration of about 0.5% (v/v) to about 1% (v/v), including 1% (v/v).

[0979] In some embodiments, the elution liquid comprises a high percentage of an aqueous liquid, such as at least about 90% (v/v), such as at least about 91% (v/v), 92% (v/v), 93% (v/v), 94% (v/v), 95% (v/v), 96% (v/v), 97% (v/v), 98% (v/v), or 99% (v/v), of water. In some embodiments, the elution liquid further comprises about 0.05% (v/v) to about 0.5% (v/v) of TFA, such as about 0.1% TFA.

[0980] In some embodiments, the method comprises collecting the HILIC eluate, or a fraction thereof, from the solid phase extraction column, wherein the HILIC eluate comprises the at least one proteolytically digested glycopeptide. In some embodiments, after the collecting the HILIC eluate from the solid phase extraction column, the method further comprises reducing a liquid content of the collected HILIC eluate. In some embodiments, the method comprises subjecting the HILIC eluate to a peptide concentrating technique to produce a dried HILIC eluate, such as a peptide concentrating technique (e.g., SpeedVac).

[0981] In some embodiments, the method comprises reconstituting the dried HILIC eluate to form a sample suitable for introduction to the LC-MS system. In some embodiments, the dried HILIC eluate is reconstituted using 0.1% formic acid (FA) or TFA in water (e.g., in 30 μL of 0.1% FA in water).

[0982] As described in more detail herein, in some embodiments, the method comprises injecting the sample suitable for introduction to the LC-MS system into the LC-MS system. In some embodiments, the method comprises performing a mass spectrometry technique to obtain mass spectrometry data. In some embodiments, the method comprises identifying a peptide sequence of a glycopeptide from the mass spectrometry data. In some embodiments, the method comprises identifying a glycan attachment site of the glycopeptide from the mass spectrometry data. In some embodiments, the method comprises identifying a glycan structure of the glycopeptide from the mass spectrometry data. In some embodiments, the at least one glycopeptide comprises a glycan structure comprising one or more sialic acid moieties. In some embodiments, the proteolytic digest sample is obtained from a method for proteolytically digesting a fibrinogen-depleted sample, or a derivative thereof, comprising a glycoprotein.

[0983] In certain aspects, the method provided herein enable the enrichment of glycopeptide species derived from a fibrinogen-depleted sample, or a derivative thereof, such as via a proteolytic digest sample. In some embodiments, a glycopeptide concentration for a glycopeptide derived from the proteolytic digest sample is enriched by a factor of 30 or greater, such as any of 40 or greater, 50 or greater, 60 or greater, 70 or greater, 80 or greater, 90 or greater, 100 or greater, 110 or greater, 120 or greater, 130 or greater, 140 or greater, 150 or greater, 160 or greater, 170 or greater, 180 or greater, 190 or greater, or 200 or greater, with respect to a peptide concentration, wherein the peptide concentration represents an amount of a peptide that is associated with the same protein as the glycopeptide. In some embodiments, the method comprises: measuring a first plurality of peak area values for a first panel of glycopeptides; measuring a second plurality of peak area values for a second panel of unglycosylated peptides wherein each of the unglycosylated peptides of the second panel corresponds to each of the glycopeptides of the first panel by being attached to a same protein molecule before a proteolytic digestion; calculating a plurality of ratios by dividing each of the first plurality of peak area values with each of the second plurality of peak area values, respectively; and determining a median ratio from the plurality of ratios, wherein the median ratio is greater than 30.

[0984] In some embodiments, wherein the method for processing a proteolytic digest sample is performed in replicate (e.g., two or more aliquots of a proteolytic digest sample are processed using the same method for processing), the resulting coefficient of variation (CV) of a peak feature, such as peak area of the measured polypeptide, e.g., glycopolypeptide, is about 15% or less, such as about any of 14% or less, 13% or less, 12% or less, 11% or less, 10% or less, 9% or less, 8% or less, 7% or less, 6% or less, 5% or less, 4% or less, 3% or less, 2% or less, or 1% or less.

### F6. Methods for Performing a LC-MS Analysis of a Proteolytic Glycopeptide

[0985] In certain aspects, provided herein is a method for performing a LC-MS analysis on a sample comprising a proteolytic glycopeptide. In some embodiments, the liquid chromatography (LC) system is online with a mass spectrometer (i.e., proteolytic peptide species, including glycopeptides, are eluted from the LC system directing into the mass spectrometer via a mass spectrometer interface. In some embodiments, the LC technique comprises performing a chromatographic separation of one or more proteolytic peptides, including glycopeptides. In some embodiments, the one or more proteolytic peptides subjected to a chromatographic separation are obtained from a proteolytic digest sample, such as described herein.

[0986] In some embodiments, the method comprises introducing the proteolytically digested sample to a LC-MS system. In some embodiments, the method comprises performing a chromatographic separation of the proteolytically digested sample. In some embodiments, the chromatography separation comprises a period of diversion (i.e., diverted from the mass spectrometer interface, e.g., to a waste receptacle) of an initial eluate from the proteolytically digested sample. In some embodiments, the initial eluate (as assessed from the sample front) diverted from the mass spectrometer is about 1 column volume of the chromatographic column to about 5 column volumes of the chromatographic column, such as any of about 1 column volumes to about 4 column volumes, about 2 column volumes to about 5 column volumes, or about 3 column volumes to about 4 column volumes. In some embodiments, the initial eluate (as assessed from the sample front) diverted from the mass spectrometer is at least about 0.5 column volumes, such as at least about any of 1 column volume, 1.5 column volumes, 2 column volumes, 2.5 column volumes, 3 column volumes, 3.5 column volumes, 4 column volumes, 4.5 column volumes, or 5 column volumes. In some embodiments, the initial eluate (as assessed from the sample front) diverted from the mass spectrometer is about 5 column volumes or less, such as about any of 4.5 column volumes or less, 4 column volumes or less, 3.5 column volumes or less, 3 column volumes or less, 2.5 column volumes or less, 2 column volumes or less, 1.5 column volumes or less, 1 column volume or less, or 0.5 column volumes or less. In some embodiments, the initial eluate (as assessed from the sample front) diverted from the mass spectrometer is about any of 0.5 column volumes, 1 column volume, 1.5 column volumes, 2 column volumes, 2.5 column volumes, 3 column volumes, 3.5 column volumes, 4 column volumes, 4.5 column volumes, or 5 column volumes.

[0987] In some embodiments, the chromatographic separation comprises a gradient separation performing using mixtures of an aqueous mobile phase and an organic mobile phase. In some embodiments, the chromatographic separation comprises isocratic period, such as a period of at least about 90%, such as at least about any of 91%, 92%, 93%, 94%, 95%, 96%, 97%, 98%, 99%, or 100%, of an aqueous mobile phase to produce the initial eluate that is diverted from the mass spectrometer interface.

[0988] In some embodiments, the LC system comprises a reversed-phase chromatography column. In some embodiments, the reversed-phase column comprises an alkyl moiety, such as C18.

[0989] The present application contemplates a diverse array of additional features of LC-MS techniques for analyzing a sample comprising a glycopeptide using a mass spectrometer. In some embodiments, the liquid chromatography system comprises a high performance liquid chromatography system. In some embodiments, the liquid chromatography system comprises an ultra-high performance liquid chromatography system. In some embodiments, the liquid chromatography system comprises a high-flow liquid chromatography system. In some embodiments, the liquid chromatography system comprises a low-flow liquid chromatography system, such as a micro-flow liquid chromatography system or a nano-flow liquid chromatography system. In some embodiments, the liquid chromatography system is coupled, such as directly interfaced, with a mass spectrometer.

[0990] In some embodiment, the mass spectrometry technique comprises an ionization technique. Ionization techniques contemplated by the present application include techniques capable of charging polypeptides and peptide products, including glycopeptides. Thus, in some embodiments, the ionization technique is electrospray ionization (ESI). In some embodiments, the ionization technique is nano-electrospray ionization. In some embodiments, the ionization technique is atmospheric pressure chemical ionization. In some embodiments, the ionization technique is atmospheric pressure photoionization.

[0991] A diverse array of mass spectrometers are contemplated as compatible with the description, include high-resolution mass spectrometers and low-resolution mass spectrometers. In some embodiments, the mass spectrometer is a time-of-flight (TOF) mass spectrometer. In some embodiments, the mass spectrometer is a quadrupole time-of-flight (Q-TOF) mass spectrometer. In some embodiments, the mass spectrometer is a quadrupole ion trap time-of-flight (QIT-TOF) mass spectrometer. In some embodiments, the mass spectrometer is an ion trap. In some embodiments, the mass spectrometer is a single quadrupole. In some embodiments, the mass spectrometer is a triple quadrupole (QQQ). In some embodiments, the mass spectrometer is an orbitrap. In some embodiments, the mass spectrometer is a quadrupole orbitrap. In some embodiments, the mass spectrometer is a fourier transform ion cyclotron resonance (FT) mass spectrometer. In some embodiments, the mass spectrometer is a quadrupole fourier transform ion cyclotron resonance (Q-FT) mass spectrometer. In some embodiments, the mass spectrometry technique comprises positive ion mode. In some embodiments, the mass spectrometry technique comprises negative ion mode. In some embodiments, the mass spectrometry technique comprises an ion mobility mass spectrometry technique.

[0992] In some embodiments, the LC-MS technique comprises processing obtained signals MS from the mass spectrometer. In some embodiments, the LC-MS technique comprises peak detection. In some embodiments, the LC-MS technique comprises determining ionization intensity of an ionized peptide product. In some embodiments, the LC-MS technique comprises determining peak height of an ionized peptide product. In some embodiments, the LC-MS technique comprises determining peak area of an ionized peptide product. In some embodiments, the LC-MS technique comprises determining peak volume of an ionized peptide product. In some embodiments, the LC-MS technique comprises identifying an ionized peptide product by amino acid sequence. In some embodiments, the LC-MS technique comprises determining the site of a post-translational modification of an ionized peptide, such as the site of a glycosylation. In some embodiments, the LC-MS technique comprises determining the glycan structure, or a characteristic thereof, of an ionized peptide product. In some embodiments, the LC-MS technique comprises manually validating the ionized peptide product acid sequence assignments. In some embodiments, the LC-MS technique comprises a quantification technique.

### G6. Samples and Components Thereof

[0993] The methods provided herein are contemplated to be suitable for analyzing a diverse array of samples, such as blood-based biological samples. In some embodiments, the blood-derived sample is a plasma sample. In some embodiments, the blood-derived sample is a serum sample. Plasma is a fluid component of blood that is obtained when a clotting-prevention agent is added to whole blood and then the tube is centrifuged to separate the cellular material. The upper lighter colored liquid layer in the tube is removed as plasma. Common anti-coagulant agents ACD (anticoagulant citrate dextrose), Streck, EDTA (ethylenediaminetetraacetic acid), Heparin or Li-Heparin, oxalate fluoride, and a citrate phosphate dextrose adenine (CPDA). Serum is a fluid obtained when whole blood is allowed to clot in a tube and then centrifuged so that the clotted blood, including red cells, are at the bottom of the collection tube, leaving a straw-colored liquid above the clot. The straw-colored liquid in the tube is removed as serum. In some embodiments, the serum comprises fibrinogen.

[0994] The methods provided herein are particularly useful for the analysis of blood-derived samples comprising a glycoprotein, such as to generate glycopeptide containing specimens for analysis with a mass spectrometer. The methods provided herein, in some embodiments, enable the analysis of glycopeptides that elute during early or late phases of a reversed-phase chromatographic separation and are typically missed during conventional mass spectrometry approaches. For the situation where a sample contains hydrophilic salts and hydrophilic glycopeptides, it can be challenging to desalt the sample with a C18 solid phase extraction material without removing a significant portion of the hydrophilic glycopeptides that are needed for an analysis of the sample. For example, glycopeptides with an overall hydrophilic character may elute from a reversed-phase material, such as in a desalting column, and are washed away or not introduced to the mass spectrometer during a data acquisition phase of a mass spectrometry technique. In some embodiments, glycopeptides with an overall hydrophobic character may have a high affinity for a reversed-phase material, such as in a desalting column or a chromatography column, and are not properly eluted from a desalting column or during a data acquisition portion of a mass spectrometry technique.

[0995] In some embodiments, the method comprises an upstream sample preparation technique, such as for obtaining plasma or serum from a blood sample, performed prior to methods for proteolytically digesting a sample. In some embodiments, the upstream sample preparation technique comprises a cell lysis step. In some embodiments, the upstream sample preparation technique comprises a filtration step. In some embodiments, the upstream sample preparation technique comprises a dilution step. In some embodiments, the upstream sample preparation technique comprises a protein concentration determination step.

[0996] In some embodiments, the sample is obtained from an individual. In some embodiments, the sample is obtained from a human individual.

### H6. Systems, Kits, and Compositions

[0997] In certain aspects, contemplated herein are systems, kits, and compositions useful for performing the methods described herein. In some embodiments, provided herein is a system, kit, and/or composition useful for performing a proteolytic digestion of a biological sample comprising a glycoprotein as described herein. In some embodiments, provided herein is a system, kit, and/or composition useful for performing a LC-MS analysis of a proteolytic glycopeptide as described herein. In some embodiments, provided herein is a system, kit, and/or composition useful for performing a proteolytic digestion of a biological sample comprising a glycoprotein followed by LC-MS analysis of the proteolytic glycopeptide produced therefrom.

[0998] The present invention is not intended to be limited in scope to the particular disclosed embodiments, which are provided, for example, to illustrate various aspects of the invention. Various modifications to the compositions and methods described will become apparent from the description and teachings herein. Such variations may be practiced without departing from the true scope and spirit of the disclosure and are intended to fall within the scope of the present disclosure.

### Section 7—Methods and Systems for Analyzing Site-Specific Monomer Composition

### Peptide Structure Data Analysis

### I. Exemplary System for Peptide Structure Data Analysis

a. Analysis System for Peptide Structure Data Analysis

[0999] FIG. 60 is a block diagram of an analysis system 6000 in accordance with one or more embodiments. Analysis system 6000 can be used to both detect and analyze various peptide structures that have been associated to various disease states. Analysis system 6000 is one example of an implementation for a system that may be used to perform data analysis 108 in FIG. 1A. Thus, analysis system 6000 is described with continuing reference to workflow 100 as described in FIGS. 1A, 1B, and/or 1C.

[1000] Analysis system 6000 may include computing platform 6002 and data store 6004. In some embodiments, analysis system 6000 also includes display system 6006. Computing platform 6002 may take various forms. In one or more embodiments, computing platform 6002 includes a single computer (or computer system) or multiple computers in communication with each other. In other examples, computing platform 6002 takes the form of a cloud computing platform.

[1001] Data store 6004 and display system 6006 may each be in communication with computing platform 6002. In some examples, data store 6004, display system 6006, or both may be considered part of or otherwise integrated with computing platform 6002. Thus, in some examples, computing platform 6002, data store 6004, and display system 6006 may be separate components in communication with each other, but in other examples, some combination of these components may be integrated together. Communication between these different components may be implemented using any number of wired communications links, wireless communications links, optical communications links, or a combination thereof.

[1002] Analysis system 6000 includes, for example, peptide structure analyzer 6008, which may be implemented using hardware, software, firmware, or a combination thereof. In one or more embodiments, peptide structure analyzer 6008 is implemented using computing platform 6002.

[1003] Peptide structure analyzer 6008 receives peptide structure data 6010 for processing. Peptide structure data 6010 may be, for example, the peptide structure data that is output from sample preparation and processing 106 in FIGS. 1A, 1B, and 1C. Accordingly, peptide structure data 6010 may correspond to set of peptide structures 122 identified for biological sample 112 and may thereby correspond to biological sample 112.

[1004] Peptide structure data 6010 can be sent as input into peptide structure analyzer 6008, retrieved from data store 6004 or some other type of storage (e.g., cloud storage), accessed from cloud storage, or obtained in some other manner. In some cases, peptide structure data 6010 may be retrieved from data store 6004 in response to (e.g., directly or indirectly based on) receiving user input entered by a user via an input device.

[1005] Peptide structure analyzer 6008 includes model 6012 that is configured to receive peptide structure data 6010 for processing. Model 6012 may be implemented in any of a number of different ways. Model 6012 may be implemented using any number of models, functions, equations, algorithms, and/or other mathematical techniques.

[1006] In one or more embodiments, model 6012 includes machine learning system 6014, which may itself be comprised of any number of machine learning models and/or algorithms. For example, machine learning system 6014 may include, but is not limited to, at least one of a deep learning model, a neural network, a linear discriminant analysis model, a quadratic discriminant analysis model, a support vector machine, a random forest algorithm, a nearest neighbor algorithm (e.g., a k-Nearest Neighbors algorithm), a combined discriminant analysis model, a k-means clustering algorithm, an unsupervised model, a multivariable regression model, a penalized multivariable regression model, or another type of model. In various embodiments, model 6012 includes a machine learning system 6014 that comprises any number of or combination of the models or algorithms described above.

[1007] In various embodiments, model 6012 analyzes peptide structure data 6010 to generate disease indicator 6016 that indicates whether the biological sample is positive for a colorectal cancer disease state based on set of peptide structures 6018 identified as being associated with the colorectal cancer disease state. Peptide structure data 6010 may include quantification data for the plurality of peptide structures. Quantification data for a peptide structures can include at least one of an abundance, a relative abundance, a normalized abundance, a relative quantity, an adjusted quantity, a normalized quantity, a relative concentration, an adjusted concentration, or a normalized concentration. For example, peptide structure data 6010 may include a set of quantification metrics for each peptide structure of a plurality of peptide structures. A quantification metric for a peptide structure may be selected as one of a relative quantity, an adjusted quantity, a normalized quantity, a relative abundance, an adjusted abundance, and a normalized abundance. In some cases, a quantification metric for a peptide structure is selected from one of a relative concentration, an adjusted concentration, and a normalized concentration. In one or more embodiments, the quantification metrics used are normalized abundances. In this manner, peptide structure data 6010 may provide abundance information about the plurality of peptide structures with respect to biological sample 112.

[1008] Disease indicator 6016 may take various forms. In some examples, disease indicator 6016 includes a classification that indicates whether or not the subject is positive for the melanoma disease state. In various embodiments, disease indicator 6016 can include a score 6020. In some aspects, score 6020 indicates whether the melanoma disease state is present or not. For example, score 6020 may be, a probability score that indicates how likely it is that the biological sample 112 evidences the presence of the melanoma disease state. Alternatively or in addition, disease indicator 6016 includes a classification hat indicates whether or not the subject has immunotherapy responsive melanoma (i.e., will respond to immunotherapy treatment, for example immune checkpoint inhibitors such as ipilimumab, nivolumab, and/or pembrolizumab) or immunotherapy nonresponsive melanoma (i.e., will not respond to immunotherapy treatment, for example immune checkpoint inhibitors such as ipilimumab, nivolumab, and/or pembrolizumab). In such cases, score 6020 may be, for example, a probability score that indicates how likely it is that the biological sample 112 evidences the presence of an immunotherapy responsive melanoma.

[1009] In one or more embodiments, a peptide structure of set of peptide structures 6018 comprises a glycosylated peptide structure, or glycopeptide structure, that is defined by a peptide sequence and a glycan structure attached to a linking site of the peptide sequence quantity. For example, the peptide structure may be a glycopeptide or a portion of a glycopeptide. In some embodiments, a peptide structure of set of peptide structures 6018 comprises an aglycosylated peptide structure that is defined by a peptide sequence. For example, the peptide structure may be a peptide or a portion of a peptide and may be referred to as a quantification peptide.

[1010] Set of peptide structures 6018, and/or monomer weight scores derived therefrom, may be identified as being those most predictive or relevant to the melanoma disease state based on training of model 6012.

[1011] In various embodiments, machine learning system 6014 takes the form of binary classification model 6022. Binary classification model 6022 may include, for example, but is not limited to, a regression model. Binary classification model 6022 may include, for example, a penalized multivariable regression model that is trained to identify set of peptide structures 6018 from a plurality of (or panel of) peptide structures identified in various subjects. Binary classification model 6022 may be trained to identify weight coefficients for peptide structures and those peptide structures having non-zero weights or weight coefficients above a selected threshold (e.g., absolute weight coefficient above 0.0, 0.01, 0.05, 0.1, 0.015, 0.2, etc.) may be selected for inclusion in set of peptide structures 6018.

[1012] Peptide structure analyzer 6008 may generate final output 128 based on disease indicator 6016 output by model 6012. In other embodiments, final output 128 may be an output generated by model 6012.

[1013] In some embodiments, final output 128 includes disease indicator 6016. In one or more embodiments, final output 128 includes diagnosis output 6024, treatment output 6026, or both. Diagnosis output 6024 may include, for example, a diagnosis for the melanoma state. The diagnosis can include a positive diagnosis or a negative diagnosis for the melanoma disease state. Alternatively or in addition, the diagnosis can include a determination that the subject has immunotherapy responsive melanoma or immunotherapy nonresponsive melanoma. In some aspects, immunotherapy responsive melanoma describes melanoma responsive to treatment with immune checkpoint inhibitors. In some aspects, immunotherapy responsive melanoma describes melanoma responsive to combination treatment with ipilimumab and nivolumab. In some aspects, immunotherapy responsive melanoma describes melanoma responsive to combination treatment with pembrolizumab.

[1014] In one or more embodiments, when disease indicator 6016 and/or diagnosis output 6024 indicate a positive diagnosis for the melanoma disease state, a biopsy may be recommended. For example, a biopsy of the subject may be performed in response to disease indicator 6016 and/or diagnosis output 6024 indicating a positive diagnosis for the melanoma disease state. In some embodiments, peptide structure analyzer 6008 (or another system implemented on computing platform 6002) may generate a report recommending that a biopsy is to be performed for the subject in response to disease indicator 6016 and/or diagnosis output 6024 indicating a positive diagnosis for the melanoma disease state. In other embodiments, peptide structure analyzer 6008 may send diagnosis final output 128 to remote system 130 over one or more wireless, wired, and/or optical communications links and remote system 130 may generate a report recommending that a biopsy is to be performed for the subject in response to disease indicator 6016 and/or diagnosis output 6024 indicating a positive diagnosis for the adenoma or colorectal cancer disease state. The biopsy may be used to confirm the diagnosis to determine whether or not to administer treatment, which treatment to administer, and/or how quickly to administer treatment. When disease indicator 6016 and/or diagnosis output 6024 indicate a negative diagnosis for the melanoma disease state, the report that is generated by peptide structure analyzer 6008, remote system 130, or some other system implemented on computing platform 142 may recommend a period of monitoring for the subject. For example, a negative diagnosis indication by disease indicator 6016 and/or diagnosis output 6024 may thus help prevent unnecessary treatment or overtreatment of the subject.

[1015] Treatment output 6026 may include, for example, at least one of an identification of a treatment for the subject, a treatment plan for administering the treatment, or both. Treatment for melanoma may include, for example, but is not limited to, at least one of surgery, radiation therapy, a targeted drug therapy (e.g., one or more targeted therapeutic agents), chemotherapy (e.g., one or more chemotherapeutic agents), immunotherapy (e.g., one or more immunotherapeutic agents such as immune checkpoint inhibitors ipilimumab, nivolumab, and/or pembrolizumab), hormone therapy, neoadjuvant therapy, or some other form of treatment. The treatment plan may include, for example, but is not limited to, a timeline or schedule for administering the treatment, dosing information, other treatment-related information, or a combination thereof.

[1016] Final output 128 may be sent to remote system 130 for processing in some examples. In other embodiments, final output 128 may be displayed on graphical user interface 6030 in display system 6006 for viewing by a human operator.

b. Computer Implemented System

[1017] FIG. 61 is a block diagram of a computer system in accordance with various embodiments. Computer system 6100 may be an example of one implementation for computing platform 6002 described above in FIG. 60.

[1018] In one or more examples, computer system 6100 can include a bus 6102 or other communication mechanism for communicating information, and a processor 6104 coupled with bus 6102 for processing information. In various embodiments, computer system 6100 can also include a memory, which can be a random-access memory (RAM) 6106 or other dynamic storage device, coupled to bus 6102 for determining instructions to be executed by processor 6104. Memory also can be used for storing temporary variables or other intermediate information during execution of instructions to be executed by processor 6104. In various embodiments, computer system 6100 can further include a read only memory (ROM) 6108 or other static storage device coupled to bus 6102 for storing static information and instructions for processor 6104. A storage device 6110, such as a magnetic disk or optical disk, can be provided and coupled to bus 6102 for storing information and instructions.

[1019] In various embodiments, computer system 6100 can be coupled via bus 6102 to a display 6112, such as a cathode ray tube (CRT), liquid crystal display (LCD), or light emitting diode (LED) for displaying information to a computer user. An input device 6114, including alphanumeric and other keys, can be coupled to bus 6102 for communicating information and command selections to processor 6104. Another type of user input device is a cursor control 6116, such as a mouse, a joystick, a trackball, a gesture input device, a gaze-based input device, or cursor direction keys for communicating direction information and command selections to processor 6104 and for controlling cursor movement on display 6112. This input device 6114 typically has two degrees of freedom in two axes, a first axis (e.g., x) and a second axis (e.g., y), that allows the device to specify positions in a plane. However, it should be understood that input devices 6114 allowing for three-dimensional (e.g., x, y, and z) cursor movement are also contemplated herein.

[1020] Consistent with certain implementations of the present teachings, results can be provided by computer system 6100 in response to processor 6104 executing one or more sequences of one or more instructions contained in RAM 6106. Such instructions can be read into RAM 6106 from another computer-readable medium or computer-readable storage medium, such as storage device 6110. Execution of the sequences of instructions contained in RAM 6106 can cause processor 6104 to perform the processes described herein. Alternatively, hard-wired circuitry can be used in place of or in combination with software instructions to implement the present teachings. Thus, implementations of the present teachings are not limited to any specific combination of hardware circuitry and software.

[1021] The term “computer-readable medium” (e.g., data store, data storage, storage device, data storage device, etc.) or “computer-readable storage medium” as used herein refers to any media that participates in providing instructions to processor 6104 for execution. Such a medium can take many forms, including but not limited to, non-volatile media, volatile media, and transmission media. Examples of non-volatile media can include, but are not limited to, optical, solid state, magnetic disks, such as storage device 6110. Examples of volatile media can include, but are not limited to, dynamic memory, such as RAM 6106. Examples of transmission media can include, but are not limited to, coaxial cables, copper wire, and fiber optics, including the wires that comprise bus 6102.

[1022] Common forms of computer-readable media include, for example, a floppy disk, a flexible disk, hard disk, magnetic tape, or any other magnetic medium, a CD-ROM, any other optical medium, punch cards, paper tape, any other physical medium with patterns of holes, a RAM, PROM, and EPROM, a FLASH-EPROM, any other memory chip or cartridge, or any other tangible medium from which a computer can read.

[1023] In addition to computer readable medium, instructions or data can be provided as signals on transmission media included in a communications apparatus or system to provide sequences of one or more instructions to processor 6104 of computer system 6100 for execution. For example, a communication apparatus may include a transceiver having signals indicative of instructions and data. The instructions and data are configured to cause one or more processors to implement the functions outlined in the disclosure herein. Representative examples of data communications transmission connections can include, but are not limited to, telephone modem connections, wide area networks (WAN), local area networks (LAN), infrared data connections, NFC connections, optical communications connections, etc.

[1024] It should be appreciated that the methodologies described herein, flow charts, diagrams, and accompanying disclosure can be implemented using computer system 6100 as a standalone device or on a distributed network of shared computer processing resources such as a cloud computing network.

[1025] The methodologies described herein may be implemented by various means depending upon the application. For example, these methodologies may be implemented in hardware, firmware, software, or any combination thereof. For a hardware implementation, the processing unit may be implemented within one or more application specific integrated circuits (ASICs), digital signal processors (DSPs), digital signal processing devices (DSPDs), programmable logic devices (PLDs), field programmable gate arrays (FPGAs), processors, controllers, micro-controllers, microprocessors, electronic devices, other electronic units designed to perform the functions described herein, or a combination thereof.

[1026] In various embodiments, the methods of the present teachings may be implemented as firmware and/or a software program and applications written in conventional programming languages such as C, C++, Python, etc. If implemented as firmware and/or software, the embodiments described herein can be implemented on a non-transitory computer-readable medium in which a program is stored for causing a computer to perform the methods described above. It should be understood that the various engines described herein can be provided on a computer system, such as computer system 6100, whereby processor 6104 would execute the analyses and determinations provided by these engines, subject to instructions provided by any one of, or a combination of, the memory components RAM 6106, ROM, 6108, or storage device 6110 and user input provided via input device 6114.

### B7. Exemplary Methodologies Relating to Peptide Structure Data Analysis, Monomer Weight Score Calculations, and Diagnosis and Prognosis of Disease States

### I. Analyzing a Set of Peptide Structures

[1027] FIG. 36 is a flowchart of a process for analyzing a set of peptide structures in accordance with one or more embodiments. Process 3600 may be implemented using, for example, at least a portion of workflow 100 as described in FIG. 1A-1C, and/or analysis system 6000 as described in FIG. 60.

[1028] Step 3602 includes calculating a site occupancy score, for a given peptide structure at the linking site, as a function of an adjusted-raw abundance value for the given peptide structure and a sum of a set of adjusted-raw abundance values of the set of peptide structures. The adjusted-raw abundance values may be generated by normalizing a set of raw abundance values of the set of peptide structures to a corresponding reference run. The set of peptide structures can be a set of peptide structures comprising the same linking site and may be from a biological sample from a subject.

[1029] Step 3604 includes calculating a monomer weight score as a sum of the site occupancy score and a multiplier, where the multiplier is the number of a specific monomer in the set of peptide structures at the linking site. Step 3604 can additionally include calculating a peptide structure monomer weight score as a function of the site occupancy score and the number of a specific monomer for the given peptide structure. One or more peptide structure monomer weight scores may be used to calculate the monomer weight score.

[1030] Steps 3602 and 3604 can, in some cases, be repeated at least 1, 2, 3, 4, 5, 6, or more times, calculating site occupancy scores for a plurality of peptide structures and a plurality of monomer weight scores for a plurality of specific monomers at the linking site. In some cases, steps 3602 and 3604 are not repeated.

[1031] An additional step in process 3600 can include correlating the monomer weight score (or, in some cases, plurality of monomer weight scores) with an indication or disease state to determine a hazard ratio for the indication or disease state. An additional step in process 3600 can include generating a diagnosis output for the indication or disease state for the subject, using a predictive model, as a function of the monomer weight score, wherein the diagnosis output is one of a predictive probability or a risk score. An additional step in process 3600 can include generating a treatment output (e.g., an identification of a treatment to treat the subject such as identification of immunotherapy). An additional step in process 3600 can include generating a report identifying that a biological sample evidences the indication or disease state.

### II. Classifying a Biological Sample

[1032] FIG. 37 is a flowchart of a process for classifying a biological sample in accordance with one or more embodiments. Process 3700 may be implemented using, for example, at least a portion of workflow 100 as described in FIGS. 1A-1C, and/or analysis system 6000 as described in FIG. 60.

[1033] Step 3702 includes analyzing one or more monomer weight scores of a set of peptide structures from a biological sample from a subject (e.g., a subject having or suspected of having a malignancy such as melanoma) using a machine learning model to generate a disease indicator. The set of peptide structures can be a set of peptide structures comprising the same linking site and may include glycosylated peptides and non-glycosylated peptides. The set of peptide structures may include peptides structures comprising one or more site monomers of Tables 16, 17, or 18, such that the one or more monomer weight scores are monomer weight scores of the one or more site monomers of Tables 16, 17, or 18. In step 3702, in accordance with various embodiments, the one or more monomer weight scores can be associated with the melanoma disease state.

[1034] In one or more embodiments, step 3702 may be implemented using a binary classification model (e.g., a regression model). In some examples, the regression model may be, for example, penalized multivariable regression model. In various embodiments, the disease indicator may be computed using a weight coefficient associated with each peptide structure, the weight coefficient of a corresponding peptide structure of the peptide structures may indicate the relative significance of the corresponding peptide structure to the disease indicator.

[1035] In some embodiments, step 3702 may include computing a peptide structure profile for the biological sample that identifies a weighted value for each peptide structure. The weighted value for a peptide structure of the peptide structures may be a product of a quantification metric for the peptide structure identified from the peptide structure data and a weight coefficient for the peptide structure. The disease indicator may be computed using the peptide structure profile. For example, the disease indicator may be a logit equal to the sum of the weighted values for the peptide structures plus an intercept value. The intercept value may be determined during the training of the model.

[1036] The peptide structure profile for a given peptide structure may include a corresponding feature—relative abundance, concentration, site occupancy, peptide structure monomer weight—for that peptide structure. The relative abundance may be a normalized relative abundance; the concentration may be normalized concentration. In some cases, two peptide structure profiles may be computed for the same peptide structure, each profile corresponding to a different feature. For example, a first peptide structure profile may include a relative abundance for a corresponding peptide structure and a second peptide structure profile may include a concentration for the same corresponding peptide structure.

[1037] In various embodiments, the disease indicator comprises a probability that the biological sample is positive for the melanoma disease state and the supervised machine learning model is configured to generate an output that identifies the biological sample as either evidencing (“positive for”) the melanoma disease state when the disease indicator is greater than a selected threshold or not evidencing (“negative for”) the melanoma disease state when the disease indicator is not greater than the selected threshold. The selected threshold may be, for example, 0.30, 0.35, 0.40, 0.45, 0.50, 0.55, 0.60, or some other threshold between 0.30 and 0.65. In one or more embodiments, the selected threshold is 0.5.

[1038] Step 3704 includes generating a diagnosis output based on the disease indicator that classifies the biological sample as evidencing a state associated with melanoma progression and/or responsiveness to immune checkpoint inhibitory therapy. In step 3704, in accordance with various embodiments, the diagnosis output can be, for example, diagnosis of a disease or malignancy (e.g., melanoma), identification of a treatment responsive malignancy (e.g., of immunotherapy responsive melanoma), and/or prognosis of disease severity.

[1039] The diagnosis output may include the disease indicator, or a diagnosis made based on the disease indicator. The diagnosis may be, for example, “positive” for the melanoma disease state if the biological sample evidences the melanoma disease state based on the disease indicator. The diagnosis may be, for example, “negative” if the biological sample does not evidence the melanoma disease state based on the disease indicator. A negative diagnosis may mean that the biological sample has a non-melanoma state. The negative diagnosis for the melanoma disease state can include at least one of a healthy state, or some other non-malignant state.

[1040] Generating the diagnosis output in step 3704 may include determining that the score falls above (or at or above) a selected threshold and generating a positive diagnosis for the melanoma disease state. Alternatively, step 3704 can include determining that the score falls below (or at or below) a selected threshold and generating a negative diagnosis for the adenoma or melanoma disease state. In some scoring systems, the score can include a probability score and the selected threshold can be 0.5. In other scoring systems, the selected threshold can fall within a range between 0.30 and 0.65.

[1041] In one or more embodiments, the final output in step 3704 may include a treatment output if the diagnosis output indicates a positive diagnosis for the melanoma disease state or a positive identification of immunotherapy responsive melanoma. The treatment output may include, for example, at least one of an identification of a treatment for the subject, a treatment plan for administering the treatment, or both. Treatment for melanoma may include, for example, but is not limited to, at least one of surgery, radiation therapy, a targeted drug therapy (e.g., one or more targeted therapeutic agents), chemotherapy (e.g., one or more chemotherapeutic agents), immunotherapy (e.g., one or more immunotherapeutic agents, e.g., immune checkpoint inhibitors such as ipilimumab, nivolumab, and/or pembrolizumab)), or some other form of treatment. The treatment plan may include, for example, but is not limited to, a timeline or schedule for administering the treatment, dosing information, other treatment-related information, or a combination thereof.

[1042] FIG. 38 is a flowchart of a process for treating a subject with melanoma. Step 3802 includes analyzing one or more monomer weight scores corresponding to at least one site monomer identified in Table 16 using a machine learning model to generate a diagnosis output that classifies the biological sample as evidencing a state associated with melanoma progression. Such analysis may be performed in line with the methods described above. Step 3804 includes administering a therapeutically effective amount of a treatment for melanoma. In some cases, for example where step 3802 identifies the subject as having immunotherapy sensitive melanoma, the treatment administered in step 3804 is an immunotherapy (e.g., immune checkpoint inhibitors such as ipilimumab, nivolumab, and/or pembrolizumab).

[1043] The group of site monomers in Tables 16, 17, or 18 include site monomers that have been determined relevant to distinguishing at least between melanoma and a healthy state and between immunotherapy responsive melanoma and immunotherapy nonresponsive melanoma. For example, the group of site monomers may be used to predict the probability of melanoma for use in clinically screening patients. In another example, the group of site monomers may be used to predict the probability of having immunotherapy responsive melanoma for use in informing treatment decisions.

[1044] In one or more embodiments, the at least 1 site monomer includes at least 1, at least 2, at least 3, at least 4, at least 5, or more of the site monomers listed in Table 16. In some embodiments, the at least 1 site monomer includes 1 or both of the site monomers listed in Table 18.

TABLE 16
Markers (Site Monomers) Associated with Melanoma

| | | | | | |
|---|---|---|---|---|---|
| | | | | Glycos | |
| | | | | site | |
| | | Protein | Pept | within | |
| Marker (Site | Protein | SEQ | SEQ | Prot | |
| Monomer) | Name | ID NO | ID NO | SEQ | Monomer |

| | | | | |
|---|---|---|---|---|
| TRFE_630_fuco | 152 | 1364 | 360 | Fucose |
| CFAH_882_fuco | 253 | 1465 | 882 | Fucose |
| HPT_184_fuco | 354 | 1566 | 184 | Fucose |
| FETUA_156_fuco | 455 | 1667 | 156 | Fucose |
| IC1_253_fuco | 556 | 1768 | 253 | Fucose |
| HPT_207_fuco | 354 | 1566 | 207 | Fucose |
| A1AT_70_fuco | 657 | 1869 | 70 | Fucose |
| HEMO_187_fuco | 758 | 1970 | 187 | Fucose |
| AGP12_56_fuco | 859 | 2071 | 56 | Fucose |
| CERU_762_fuco | 960 | 2172 | 762 | Fucose |
| HPT_241_fuco | 354 | 1566 | 241 | Fucose |
| VTNC_242_fuco | 1061 | 2273 | 242 | Fucose |
| IC1_48_sial | 556 | 1768 | 48 | Sialic Acid |
| CLUS_86_sial | 1162 | 2374 | 86 | Sialic Acid |
| APOE_308_sial | 1263 | 2475 | 308 | Sialic Acid |
| HPT_241_sial | 354 | 1566 | 241 | Sialic Acid |

TABLE 17
Fucose Markers Associated with Melanoma

| | | | | Glycos | |
|---|---|---|---|---|---|
| | | | | site | |
| | | Protein | Pept | within | |
| Marker (Site | Protein | SEQ | SEQ | Prot | |
| Monomer) | Name | ID NO | ID NO | SEQ | Monomer |
| TRFE_630_fuco | Serotransferrin | 152 | 1364 | 360 | Fucose |
| CFAH_882_fuco | Complement factor H | 253 | 1465 | 882 | Fucose |
| HPT_184_fuco | Haptoglobin | 354 | 1566 | 184 | Fucose |
| FETUA_156_fuco | Alpha-2-HS- | 455 | 1667 | 156 | Fucose |
| | glycoprotein | | | | |
| IC1_253_fuco | Plasma protease C1 | 556 | 1768 | 253 | Fucose |
| | inhibitor | | | | |
| HPT_207 fuco | Haptoglobin | 354 | 1566 | 207 | Fucose |
| A1AT_70_fuco | Alpha-1-antitrypsin | 657 | 1869 | 70 | Fucose |
| HEMO_187_fuco | Hemopexin | 758 | 1970 | 187 | Fucose |
| AGP12_56_fuco | Alpha-1-acid | 859 | 2071 | 56 | Fucose |
| | glycoprotein 1, | | | | |
| | Alpha-1-acid | | | | |
| | glycoprotein 2 | | | | |
| CERU_762_fuco | Ceruloplasmin | 960 | 2172 | 762 | Fucose |
| HPT_241_fuco | Haptoglobin | 354 | 1566 | 241 | Fucose |
| VTNC_242_fuco | Vitronectin | 1061 | 2273 | 242 | Fucose |

TABLE 18
Fucose Markers Strongly Associated with Melanoma

| | | | | Glycos | |
|---|---|---|---|---|---|
| | | | | site | |
| | | Protein | Pept | within | |
| Marker (Site | Protein | SEQ | SEQ | Prot | |
| Monomer) | Name | ID NO | ID NO | SEQ | Monomer |
| CFAH_882_fuco | Complement | 253 | 1465 | 882 | Fucose |
| | factor H | | | | |
| HPT_184_fuco | Hap toglobin | 354 | 1566 | 184 | Fucose |

### III. Monitoring a Subject for a Melanoma Disease State

[1045] FIG. 39 is a flowchart of a process for monitoring a subject for a melanoma disease state in accordance with one or more embodiments. Process 3900 may be implemented using, for example, at least a portion of workflow 100 as described in FIGS. 1A-1C, and/or analysis system 6000 as described in FIG. 60.

[1046] Step 3902 includes receiving first monomer weight score data for a first biological sample obtained from a subject at a first timepoint.

[1047] Step 3904 includes analyzing the first monomer weight score data using a supervised machine learning model to generate a first disease indicator based on at least 1 site monomer from a group of site monomers identified in Table 16, 17, or 18. The group of site monomers in Tables 16, 17, or 18 includes a group of site monomers associated with a melanoma disease state in accordance with various embodiments. The supervised machine can be a binary classification model. In some embodiments, the binary classification model can be a logistical regression model.

[1048] Step 3906 includes receiving second monomer weight score data of a second biological sample obtained from the subject at a second timepoint.

[1049] Step 3908 includes analyzing the second monomer weight score data using the supervised machine learning model to generate a second disease indicator based on the at least 1 site monomer selected from the group of site monomers identified in Tables 16, 17, or 18.

[1050] Step 3910 includes generating a diagnosis output based on the first disease indicator and the second disease indicator. Generating the diagnostic output can include comparing the second disease indicator to the first disease indicator.

[1051] In some embodiments, the first disease indicator indicates that the first biological sample evidences the negative diagnosis for the melanoma disease state and the second biological sample evidences the positive diagnosis for the melanoma disease. In other embodiments, the diagnosis output identifies whether a non-melanoma disease state has progressed to the melanoma disease state wherein the non-melanoma disease state includes either a healthy state, or a control state. in some embodiments, the first disease indicator indicates that the first biological sample evidences immunotherapy sensitive melanoma and the second biological sample evidences immunotherapy resistant melanoma.

### C7. Peptide Structure and Product Compositions, Kits and Reagents

[1052] Table 19 identifies the proteins corresponding to the site monomers or peptide structures of Tables 16, 17, 18, 29, and 23A-D. Table 19 identifies a corresponding protein abbreviation and protein name for each of protein SEQ ID NOS: 52-63, 76, and 87-94. Further, Table 19 identifies a corresponding Uniprot ID for each of protein SEQ ID NOS: 52-63, 76, and 87-94.

TABLE 19
Protein SEQ ID NOS

| Protein | Protein | Uniprot | Prot Seq |
|---|---|---|---|
| Abbrev. | Name | ID | ID NO. |
| TRFE | Serotransferrin | P02787 | 152 |
| CFAH | Complement factor H | P08603 | 253 |
| HPT | Haptoglobin | P00738 | 354 |
| FETUA | Alpha-2-HS- | P02765 | 455 |
| | glycoprotein | | |
| IC1 | Plasma protease C1 | P05155 | 556 |
| | inhibitor | | |
| A1AT | Alpha-1-antitrypsin | P01009 | 657 |
| HEMO | Hemopexin | P02790 | 758 |
| AGP12 | Alpha-1-acid | P02763, | 859 |
| | glycoprotein 1, | P19652 | |
| | Alpha-1-acid | | |
| | glycoprotein 2 | | |
| CERU | Ceruloplasmin | P00450 | 960 |
| VTNC | Vitronectin | P04004 | 1061 |
| CLUS | Clusterin | P10909 | 1162 |
| APOE | Apolipoprotein E | P02649 | 1263 |
| APOH | Beta-2- | P02749 | 2576 |
| | glycoprotein1 | | |
| AACT | Alpha-1- | P01011 | 3787 |
| | antichymotrypsin | | |
| APOB | Apolipoprotein B-100 | P04114 | 3888 |
| APOM | Apolipoprotein M | O95445 | 3989 |
| IGG1 | Immunoglobulin | P01857 | 4090 |
| | heavy constant | | |
| | gamma 1 | | |
| IGG2 | Immunoglobulin | P01859 | 4191 |
| | heavy constant | | |
| | gamma 2 | | |
| KLKB1 | Plasma Kallikrein | P03952 | 4292 |
| KLKB1 | Plasma Kallikrein | P03952 | 4393 |
| FINC | Fibronectin | P02751 | 494 |

[1053] Aspects of the disclosure include kits comprising one or more compositions, each comprising one or more peptide structures of the disclosure that can be used as assay standards, and instructions for use. Kits in accordance with one or more embodiments described herein may include a label indicating the intended use of the contents of the kit. The term “label” as used herein with respect to a kit includes any writing, or recorded material supplied on or with a kit, or that otherwise accompanies a kit.

[1054] The peptide structures and the transitions produced therefrom, as well as monomer weight scores calculated therefrom as described herein, may be useful for diagnosing and treating a melanoma disease state. A transition includes a precursor ion and at least one product ion grouping. As reviewed herein, the peptide structures, as well as their corresponding precursor ion and product ion groupings (these ions having defined m/z ratios or m/z ratios that fall within the m/z ranges identified herein), can be used in mass spectrometry-based analyses to diagnose and facilitate treatment of diseases, such as, for example, melanoma.

[1055] Aspects of the disclosure include methods for analyzing one or more peptide structures, as described herein. In some embodiments, the methods involve processing a sample from a patient to generate a prepared sample that can be inputted into a mass spectrometry system (e.g., a reaction monitoring mass spectrometry system). In certain embodiments, processing the sample can comprise performing one or more of: a denaturation procedure, a reduction procedure, an alkylation procedure, and a digestion procedure. The denaturation and reduction procedures may be implemented in a manner similar to, for example, denaturation and reduction 202 in FIGS. 1B-1C. The alkylation procedure may be implemented in a manner similar to, for example, alkylation procedure 204 in FIGS. 1B-1C. The digestion procedure may be implemented in a manner similar to, for example, digestion procedure 206 in FIGS. 1B-1C.

[1056] In some embodiments, the methods for analyzing one or more peptide structures involve detecting a set of product ions generated by a reaction monitoring mass spectrometry system in which one or more product ions may correspond to each of the one or more peptide structures that have been inputted into the mass spectrometry system. As described herein, each peptide structure can be converted into a set of product ions having a defined m/z ratio. In some embodiments, the methods involve generating quantification (e.g., abundance) data for the one or more product ions detected using the reaction monitoring mass spectrometry system.

[1057] In some embodiments, the methods further comprise generating a diagnosis output using the quantification data and a model that has been trained using supervised or unsupervised machine learning. In certain embodiments, the reaction monitoring mass spectrometry system may include multiple/selected reaction monitoring mass spectrometry (MRM/SRM-MS) to detect the one or more product ions and generate the quantification data.

### I. Representative Experimental Results

[1058] To assess the association of individual peptide structures (biomarkers) with metastatic advanced melanoma, univariate age- and sex-adjusted Cox regression analysis was performed on a cohort of 205 samples sourced from Massachusetts General Hospital. Results of the analysis are summarized below with reference to Tables 20-21 and FIGS. 41-45.

TABLE 20
all fucose markers

| Marker (Site Monomer) | HR | P | FDR |
|---|---|---|---|
| TRFE_630_fuco | 1.544 | 3.66E−05 | 6.18E−03 |
| CFAH_882_fuco | 1.486 | 5.62E−05 | 6.18E−03 |
| HPT_184_fuco | 1.512 | 6.04E−05 | 6.18E−03 |
| FETUA_156_fuco | 1.532 | 2.26E−04 | 1.59E−02 |
| IC1_253_fuco | 1.453 | 2.60E−04 | 1.59E−02 |
| HPT_207_fuco | 1.544 | 4.23E−04 | 1.86E−02 |
| A1AT_70_fuco | 1.425 | 5.91E−04 | 1.86E−02 |
| HEMO_187_fuco | 1.429 | 6.76E−04 | 1.89E−02 |
| AGP12_56_fuco | 1.523 | 7.54E−04 | 1.93E−02 |
| CERU_762_fuco | 1.444 | 1.08E−03 | 2.38E−02 |
| HPT_241_fuco | 1.365 | 1.50E−03 | 2.38E−02 |
| VTNC_242_fuco | 1.39 | 3.55E−03 | 4.36E−02 |

TABLE 21
2 fucose markers

| Marker (Site Monomer) | Coefficient |
|---|---|
| CFAH_882_fuco | 0.2498674 |
| HPT_184_fuco | 0.2396704 |

### D7. Exemplary Embodiments for Melanoma Diagnosis, Prognosis, and Treatment

[1059] The present disclosure concerns embodiments for systems, methods, and compositions related to identification of melanoma, risk thereof, or responsiveness thereof to a particular treatment (e.g., immunotherapy) in an individual. The embodiments concern classifying biological samples, measuring for one or more certain markers from a biological sample, assaying for one or more certain markers from a biological sample, determining the presence of one or more certain markers from a biological sample, and so forth. Embodiments of the disclosure utilize models that accurately either identify, for example, that an individual has melanoma, has a higher risk for melanoma over the general population, has melanoma that is responsive to immunotherapy, or has melanoma that is not responsive to immunotherapy, based on the presence of one or more markers in sample(s) from the individual. The individual may or may not be at a higher risk for melanoma based on one or more risk factors. An individual may be at risk for melanoma based on family or personal history; age; having one or more genetic markers associated with melanoma; and/or other risk factor for melanoma recognized in the art.

[1060] In various embodiments of the disclosure, an individual is in need of identifying whether or not they have melanoma, or a risk thereof. The individual may be subjected to measuring or testing for one or more markers encompassed herein as a matter of routine health maintenance or because of a specific concern, for example, such as the presence of one or more risk factors and/or one or more symptoms of melanoma. The individual may be in need of such identification based on any one of the risk factors noted above, or the individual may be in need of such identification based on having one or more symptoms of melanoma.

[1061] In some cases, the analysis of the sample of the individual as described herein is the sole test utilized for identifying melanoma, whereas in other cases a medical provider may utilize one or more other tests, such as biopsy, ultrasound; magnetic resonance imaging; CT scan; and so forth. In particular embodiments, calculating a monomer weight score for one or more site monomers markers of Table 16, 17, or 18 is utilized alone or in conjunction with one or more of these tests.

[1062] In some embodiments, the systems, methods, and compositions encompassed herein are sufficiently specific to utilize markers that distinguish between control and melanoma. In some embodiments, the systems, methods, and compositions encompassed herein are sufficiently specific to utilize markers that distinguish between melanoma that is responsive to immunotherapy and melanoma that is not responsive to immunotherapy. In some embodiments, the markers are accurate regardless of the status of one or more characteristics of the individual: biological sex, sample source, sample collection, or age, as examples.

[1063] In some embodiments, the individual is suspected of having melanoma or is at risk for melanoma and is in need of diagnosis thereof in addition to identification whether it is a particular stage of melanoma. In various embodiments, the individual is known to have melanoma and is in need of determining whether it is early stage melanoma or late stage melanoma, such as to determine a treatment regimen for the cancer. In specific embodiments, the same test that identifies whether an individual has melanoma determines whether the melanoma is early stage or late stage or a particular stage.

[1064] In various embodiments, the sample for analysis for melanoma identification may be a solid or fluid from the individual, such as skin, peripheral blood, serum, and/or plasma from the individual. The present disclosure provides for measuring for one or more circulating glycoproteins, glycopeptides, or non-glycosylated peptides in blood, serum, or plasma to diagnose or identify the presence of melanoma and/or to identify early stage or late stage melanoma in an individual. In various embodiments, the sample is measured for monomer weight scores for 1, 2, 3, 4, 5, or more of the site monomers of Table 16, 17, or 18.

[1065] Embodiments of the disclosure include methods of classifying samples, including skin, peripheral blood, serum, or plasma samples, from an individual suspected of having, known to have, or at risk for having melanoma by measuring from the sample for one or more glycopeptides and/or non-glycosylated peptides encompassed herein. The methods encompass whether or not melanoma is identified in the individual. In some cases, the measuring identifies the individual as not having melanoma or as having melanoma. In some cases, the measuring identifies the individual as having melanoma that is responsive to immunotherapy or as having melanoma that is not responsive to immunotherapy. The measuring may identify the individual as having a particular stage of melanoma, including at least early stage or late stage. In specific cases, the measuring comprises successive or concomitant steps of identifying that the individual has melanoma and whether the individual has early stage or late stage melanoma.

[1066] In various embodiments, an individual at risk for having melanoma is subjected to methods of the disclosure to identify, or not, the presence of melanoma. Such methods also measure for one or more glycopeptides and/or non-glycosylated peptides encompassed herein, as well as calculate monomer weight scores for one or more site monomers encompassed herein. The individual may be of any kind, although in specific cases individual at risk for having melanoma has a family history or one or more other risk factors.

[1067] Embodiments of the disclosure include methods of predicting that an individual will have melanoma, including early stage or late stage melanoma, or identifying early stage or late stage melanoma in an individual, or predicting that an individual has a melanoma that is responsive to immunotherapy by determining a monomer weight score for one or more site monomers from Table 16 in one or more samples from the individual. The individual may be known to have melanoma or may be suspected of having melanoma In various embodiments, the sample is measured for monomer weight scores for 1, 2, or more of the site monomers of Table 16, 17, or 18.

[1068] In embodiments wherein the measuring identifies the individual as having melanoma, the individual may be recommended to take action to treat the melanoma, such as with at least one of radiation therapy, chemotherapy or drug therapy (Bevacizumab, evacizumab, Irinotecan Hydrochloride, Capecitabine, Cetuximab, Ramucirumab, Oxaliplatin, Cetuximab, 5-FU, Ipilimumab, Irinotecan Hydrochloride, Pembrolizumab, Leucovorin Calcium, Trifluridine and Tipiracil Hydrochloride, Nivolumab, Nivolumab, Oxaliplatin. Panitumumab, Pembrolizumab, Ramucirumab, Regorafenib, Regorafenib, Panitumumab, Ziv-Aflibercept), immunotherapy (e.g., immune checkpoint inhibitors such as ipilimumab, nivolumab, ipilimumab plus nivolumab, and/or pembrolizumab), chemoradiotherapy, surgery, hormone therapy and/or a targeted drug therapy, as examples.

### E7. Cancer Therapy

[1069] In some aspects, the disclosed methods comprise administering a cancer therapy to a subject or patient. The cancer therapy may be chosen based on an analysis or method described herein. In some aspects, the cancer therapy comprises a local cancer therapy. In some aspects, the cancer therapy excludes a systemic cancer therapy. In some aspects, the cancer therapy excludes a local therapy. In some aspects, the cancer therapy comprises a local cancer therapy without the administration of a systemic cancer therapy. In some aspects, the cancer therapy comprises an immunotherapy, which may be an immune blockade or immune checkpoint inhibitor therapy. In some aspects, the cancer therapy comprises radiotherapy. Any of these cancer therapies may also be excluded. Combinations of these therapies may also be administered.

[1070] The term “cancer,” as used herein, may be used to describe a solid tumor, metastatic cancer, or non-metastatic cancer. In certain aspects, the cancer may originate in the bladder, blood, bone, bone marrow, brain, breast, colon, esophagus, duodenum, small intestine, large intestine, colon, rectum, anus, gum, head, kidney, liver, lung, nasopharynx, neck, ovary, pancreas, prostate, skin, stomach, testis, tongue, or uterus.

### I. Radiotherapy

[1071] In some aspects, the disclosed methods comprise administering radiotherapy, such as ionizing radiation, as a cancer therapy to a subject or patient. As used herein, “ionizing radiation” means radiation comprising particles or photons that have sufficient energy or can produce sufficient energy via nuclear interactions to produce ionization (gain or loss of electrons). A certain non-limiting example of ionizing radiation is an x-radiation. Means for delivering x-radiation to a target tissue or cell are known in the art.

[1072] In some aspects, the radiotherapy can comprise external radiotherapy, internal radiotherapy, radioimmunotherapy, or intraoperative radiation therapy (IORT). In some aspects, the external radiotherapy comprises three-dimensional conformal radiation therapy (3D-CRT), intensity modulated radiation therapy (IMRT), proton beam therapy, image-guided radiation therapy (IGRT), or stereotactic radiation therapy. In some aspects, the internal radiotherapy comprises interstitial brachytherapy, intracavitary brachytherapy, or intraluminal radiation therapy. In some aspects, the radiotherapy is administered to a primary tumor. In some aspects, the radiotherapy is administered to a metastatic tumor.

### II. Cancer Immunotherapy

[1073] In some aspects, the disclosed methods comprise administering a cancer immunotherapy as a cancer therapy to a subject or patient. Cancer immunotherapy is the use of the immune system to treat cancer. Immunotherapies can be categorized as active, passive or hybrid (active and passive). These approaches exploit the fact that cancer cells often have molecules on their surface that can be detected by the immune system, known as tumor-associated antigens (TAAs); they are often proteins or other macromolecules (e.g. carbohydrates). Active immunotherapy directs the immune system to attack tumor cells by targeting TAAs. Passive immunotherapies enhance existing anti-tumor responses and include the use of monoclonal antibodies, lymphocytes and cytokines. Various immunotherapies are known in the art, and examples are described below.

### a Checkpoint Inhibitors and Combination Treatment

[1074] Aspects of the disclosure may include administration of immune checkpoint inhibitors or immune blockade therapies, examples of which are further described below. As disclosed herein, “checkpoint inhibitor therapy” (also “immune checkpoint blockade therapy”, “immune checkpoint therapy”, “ICT,” “checkpoint blockade immunotherapy,” or “CBI”), refers to cancer therapy comprising providing one or more immune checkpoint inhibitors to a subject suffering from or suspected of having cancer.

### 1. PD-1, PDL1, and PDL2 Inhibitors

[1075] PD-1 can act in the tumor microenvironment where T cells encounter an infection or tumor. Activated T cells upregulate PD-1 and continue to express it in the peripheral tissues. Cytokines such as IFN-gamma induce the expression of PDL1 on epithelial cells and tumor cells. PDL2 is expressed on macrophages and dendritic cells. The main role of PD-1 is to limit the activity of effector T cells in the periphery and prevent excessive damage to the tissues during an immune response. Inhibitors of the disclosure may block one or more functions of PD-1 and/or PDL1 activity.

[1076] Alternative names for “PD-1” include CD279 and SLEB2. Alternative names for “PDL1” include B7-H1, B7-4, CD274, and B7-H. Alternative names for “PDL2” include B7-DC, Btdc, and CD273. In some aspects, PD-1, PDL1, and PDL2 are human PD-1, PDL1 and PDL2.

[1077] In some aspects, the PD-1 inhibitor is a molecule that inhibits the binding of PD-1 to its ligand binding partners. In a specific aspect, the PD-1 ligand binding partners are PDL1 and/or PDL2. In another aspect, a PDL1 inhibitor is a molecule that inhibits the binding of PDL1 to its binding partners. In a specific aspect, PDL1 binding partners are PD-1 and/or B7-1. In another aspect, the PDL2 inhibitor is a molecule that inhibits the binding of PDL2 to its binding partners. In a specific aspect, a PDL2 binding partner is PD-1. The inhibitor may be an antibody, an antigen binding fragment thereof, an immunoadhesin, a fusion protein, or oligopeptide. Exemplary antibodies are described in U.S. Pat. Nos. 8,735,553, 8,354,509, and 8,008,449, all incorporated herein by reference. Other PD-1 inhibitors for use in the methods and compositions provided herein are known in the art such as described in U.S. Patent Application Nos. US2014/0294898, US2014/022021, and US2011/0008369, all incorporated herein by reference.

[1078] In some aspects, the PD-1 inhibitor is an anti-PD-1 antibody (e.g., a human antibody, a humanized antibody, or a chimeric antibody). In some aspects, the anti-PD-1 antibody is selected from the group consisting of nivolumab, pembrolizumab, and pidilizumab. In some aspects, the PD-1 inhibitor is an immunoadhesin (e.g., an immunoadhesin comprising an extracellular or PD-1 binding portion of PDL1 or PDL2 fused to a constant region (e.g., an Fc region of an immunoglobulin sequence). In some aspects, the PDL1 inhibitor comprises AMP-224. Nivolumab, also known as MDX-1106-04, MDX-1106, ONO-4538, BMS-936558, and OPDIVOR, is an anti-PD-1 antibody described in WO2006/121168. Pembrolizumab, also known as MK-3475, Merck 3475, lambrolizumab, KEYTRUDA®, and SCH-900475, is an anti-PD-1 antibody described in WO2009/114335. Pidilizumab, also known as CT-011, hBAT, or hBAT-1, is an anti-PD-1 antibody described in WO2009/101611. AMP-224, also known as B7-DCIg, is a PDL2-Fc fusion soluble receptor described in WO2010/027827 and WO2011/066342. Additional PD-1 inhibitors include MEDI0680, also known as AMP-514, and REGN2810.

[1079] In some aspects, the immune checkpoint inhibitor is a PDL 1 inhibitor such as Durvalumab, also known as MEDI4736, atezolizumab, also known as MPDL3280A, avelumab, also known as MSB00010118C, MDX-1105, BMS-936559, or combinations thereof. In certain aspects, the immune checkpoint inhibitor is a PDL2 inhibitor such as rHIgM12B7.

[1080] In some aspects, the inhibitor comprises the heavy and light chain CDRs or VRs of nivolumab, pembrolizumab, or pidilizumab. Accordingly, in one aspect, the inhibitor comprises the CDR1, CDR2, and CDR3 domains of the VH region of nivolumab, pembrolizumab, or pidilizumab, and the CDR1, CDR2 and CDR3 domains of the VL region of nivolumab, pembrolizumab, or pidilizumab. In another aspect, the antibody competes for binding with and/or binds to the same epitope on PD-1, PDL1, or PDL2 as the above-mentioned antibodies. In another aspect, the antibody has at least about 70, 75, 80, 85, 90, 95, 97, or 99% (or any derivable range therein) variable region amino acid sequence identity with the above-mentioned antibodies.

### 2. CTLA-4, B7-1, and B7-2

[1081] Another immune checkpoint that can be targeted in the methods provided herein is the cytotoxic T-lymphocyte-associated protein 4 (CTLA-4), also known as CD152. The complete cDNA sequence of human CTLA-4 has the Genbank accession number L15006. CTLA-4 is found on the surface of T cells and acts as an “off” switch when bound to B7-1 (CD80) or B7-2 (CD86) on the surface of antigen-presenting cells. CTLA4 is a member of the immunoglobulin superfamily that is expressed on the surface of Helper T cells and transmits an inhibitory signal to T cells. CTLA4 is similar to the T-cell co-stimulatory protein, CD28, and both molecules bind to B7-1 and B7-2 on antigen-presenting cells. CTLA-4 transmits an inhibitory signal to T cells, whereas CD28 transmits a stimulatory signal. Intracellular CTLA-4 is also found in regulatory T cells and may be important to their function. T cell activation through the T cell receptor and CD28 leads to increased expression of CTLA-4, an inhibitory receptor for B7 molecules. Inhibitors of the disclosure may block one or more functions of CTLA-4, B7-1, and/or B7-2 activity. In some aspects, the inhibitor blocks the CTLA-4 and B7-1 interaction. In some aspects, the inhibitor blocks the CTLA-4 and B7-2 interaction.

[1082] In some aspects, the immune checkpoint inhibitor is an anti-CTLA-4 antibody (e.g., a human antibody, a humanized antibody, or a chimeric antibody), an antigen binding fragment thereof, an immunoadhesin, a fusion protein, or oligopeptide.

[1083] Anti-human-CTLA-4 antibodies (or VH and/or VL domains derived therefrom) suitable for use in the present methods can be generated using methods well known in the art. Alternatively, art recognized anti-CTLA-4 antibodies can be used. For example, the anti-CTLA-4 antibodies disclosed in: U.S. Pat. No. 8,119,129, WO 01/14424, WO 98/42752; WO 00/37504 (CP675,206, also known as tremelimumab; formerly ticilimumab), U.S. Pat. No. 6,207,156; Hurwitz et al., 1998; can be used in the methods disclosed herein. The teachings of each of the aforementioned publications are hereby incorporated by reference. Antibodies that compete with any of these art-recognized antibodies for binding to CTLA-4 also can be used. For example, a humanized CTLA-4 antibody is described in International Patent Application No. WO2001/014424, WO2000/037504, and U.S. Pat. No. 8,017,114; all incorporated herein by reference.

[1084] A further anti-CTLA-4 antibody useful as a checkpoint inhibitor in the methods and compositions of the disclosure is ipilimumab (also known as 10D1, MDX-010, MDX-101, and Yervoy®) or antigen binding fragments and variants thereof (see, e.g., WO 01/14424).

[1085] In some aspects, the inhibitor comprises the heavy and light chain CDRs or VRs of tremelimumab or ipilimumab. Accordingly, in one aspect, the inhibitor comprises the CDR1, CDR2, and CDR3 domains of the VH region of tremelimumab or ipilimumab, and the CDR1, CDR2 and CDR3 domains of the VL region of tremelimumab or ipilimumab. In another aspect, the antibody competes for binding with and/or binds to the same epitope on PD-1, B7-1, or B7-2 as the above-mentioned antibodies. In another aspect, the antibody has at least about 70, 75, 80, 85, 90, 95, 97, or 99% (or any derivable range therein) variable region amino acid sequence identity with the above-mentioned antibodies.

### 3. LAG3

[1086] Another immune checkpoint that can be targeted in the methods provided herein is the lymphocyte-activation gene 3 (LAG3), also known as CD223 and lymphocyte activating 3. The complete mRNA sequence of human LAG3 has the Genbank accession number NM_002286. LAG3 is a member of the immunoglobulin superfamily that is found on the surface of activated T cells, natural killer cells, B cells, and plasmacytoid dendritic cells. LAG3's main ligand is MHC class II, and it negatively regulates cellular proliferation, activation, and homeostasis of T cells, in a similar fashion to CTLA-4 and PD-1, and has been reported to play a role in Treg suppressive function. LAG3 also helps maintain CD8+ T cells in a tolerogenic state and, working with PD-1, helps maintain CD8 exhaustion during chronic viral infection. LAG3 is also known to be involved in the maturation and activation of dendritic cells. Inhibitors of the disclosure may block one or more functions of LAG3 activity.

[1087] In some aspects, the immune checkpoint inhibitor is an anti-LAG3 antibody (e.g., a human antibody, a humanized antibody, or a chimeric antibody), an antigen binding fragment thereof, an immunoadhesin, a fusion protein, or oligopeptide.

[1088] Anti-human-LAG3 antibodies (or VH and/or VL domains derived therefrom) suitable for use in the present methods can be generated using methods well known in the art. Alternatively, art recognized anti-LAG3 antibodies can be used. For example, the anti-LAG3 antibodies can include: GSK2837781, IMP321, FS-118, Sym022, TSR-033, MGD013, BI754111, AVA-017, or GSK2831781. The anti-LAG3 antibodies disclosed in: U.S. Pat. No. 9,505,839 (BMS-986016, also known as relatlimab); U.S. Pat. No. 10,711,060 (IMP-701, also known as LAG525); U.S. Pat. No. 9,244,059 (IMP731, also known as H5L7BW); U.S. Pat. No. 10,344,089 (25F7, also known as LAG3.1); WO 2016/028672 (MK-4280, also known as 28G-10); WO 2017/019894 (BAP050); Burova E., et al., J. ImmunoTherapy Cancer, 2016; 4 (Supp. 1): P195 (REGN3767); Yu, X., et al., mAbs, 2019; 11:6 (LBL-007) can be used in the methods disclosed herein. These and other anti-LAG-3 antibodies useful in the claimed disclosure can be found in, for example: WO 2016/028672, WO 2017/106129, WO 2017062888, WO 2009/044273, WO 2018/069500, WO 2016/126858, WO 2014/179664, WO 2016/200782, WO 2015/200119, WO 2017/019846, WO 2017/198741, WO 2017/220555, WO 2017/220569, WO 2018/071500, WO 2017/015560; WO 2017/025498, WO 2017/087589, WO 2017/087901, WO 2018/083087, WO 2017/149143, WO 2017/219995, US 2017/0260271, WO 2017/086367, WO 2017/086419, WO 2018/034227, and WO 2014/140180. The teachings of each of the aforementioned publications are hereby incorporated by reference. Antibodies that compete with any of these art-recognized antibodies for binding to LAG3 also can be used.

[1089] In some aspects, the inhibitor comprises the heavy and light chain CDRs or VRs of an anti-LAG3 antibody. Accordingly, in one aspect, the inhibitor comprises the CDR1, CDR2, and CDR3 domains of the VH region of an anti-LAG3 antibody, and the CDR1, CDR2 and CDR3 domains of the VL region of an anti-LAG3 antibody. In another aspect, the antibody has at least about 70, 75, 80, 85, 90, 95, 97, or 99% (or any derivable range therein) variable region amino acid sequence identity with the above-mentioned antibodies.

### 4. TIM-3

[1090] Another immune checkpoint that can be targeted in the methods provided herein is the T-cell immunoglobulin and mucin-domain containing-3 (TIM-3), also known as hepatitis A virus cellular receptor 2 (HAVCR2) and CD366. The complete mRNA sequence of human TIM-3 has the Genbank accession number NM_032782. TIM-3 is found on the surface IFNγ-producing CD4+ Th1 and CD8+ Tc1 cells. The extracellular region of TIM-3 consists of a membrane distal single variable immunoglobulin domain (IgV) and a glycosylated mucin domain of variable length located closer to the membrane. TIM-3 is an immune checkpoint and, together with other inhibitory receptors including PD-1 and LAG3, it mediates the T-cell exhaustion. TIM-3 has also been shown as a CD4+Th1-specific cell surface protein that regulates macrophage activation. Inhibitors of the disclosure may block one or more functions of TIM-3 activity.

[1091] In some aspects, the immune checkpoint inhibitor is an anti-TIM-3 antibody (e.g., a human antibody, a humanized antibody, or a chimeric antibody), an antigen binding fragment thereof, an immunoadhesin, a fusion protein, or oligopeptide.

[1092] Anti-human-TIM-3 antibodies (or VH and/or VL domains derived therefrom) suitable for use in the present methods can be generated using methods well known in the art. Alternatively, art recognized anti-TIM-3 antibodies can be used. For example, anti-TIM-3 antibodies including: MBG453, TSR-022 (also known as Cobolimab), and LY3321367 can be used in the methods disclosed herein. These and other anti-TIM-3 antibodies useful in the claimed disclosure can be found in, for example: U.S. Pat. Nos. 9,605,070, 8,841,418, US2015/0218274, and US 2016/0200815. The teachings of each of the aforementioned publications are hereby incorporated by reference. Antibodies that compete with any of these art-recognized antibodies for binding to LAG3 also can be used.

[1093] In some aspects, the inhibitor comprises the heavy and light chain CDRs or VRs of an anti-TIM-3 antibody. Accordingly, in one aspect, the inhibitor comprises the CDR1, CDR2, and CDR3 domains of the VH region of an anti-TIM-3 antibody, and the CDR1, CDR2 and CDR3 domains of the VL region of an anti-TIM-3 antibody. In another aspect, the antibody has at least about 70, 75, 80, 85, 90, 95, 97, or 99% (or any derivable range therein) variable region amino acid sequence identity with the above-mentioned antibodies.

b. Inhibition of Co-Stimulatory Molecules

[1094] In some aspects, the immunotherapy comprises an inhibitor of a co-stimulatory molecule. In some aspects, the inhibitor comprises an inhibitor of B7-1 (CD80), B7-2 (CD86), CD28, ICOS, OX40 (TNFRSF4), 4-1BB (CD137; TNFRSF9), CD40L (CD40LG), GITR (TNFRSF18), and combinations thereof. Inhibitors include inhibitory antibodies, polypeptides, compounds, and nucleic acids.

c. Dendritic Cell Therapy

[1095] Dendritic cell therapy provokes anti-tumor responses by causing dendritic cells to present tumor antigens to lymphocytes, which activates them, priming them to kill other cells that present the antigen. Dendritic cells are antigen presenting cells (APCs) in the mammalian immune system. In cancer treatment they aid cancer antigen targeting. One example of cellular cancer therapy based on dendritic cells is sipuleucel-T.

d. CAR-T Cell Therapy

[1096] Chimeric antigen receptors (CARs, also known as chimeric immunoreceptors, chimeric T cell receptors or artificial T cell receptors) are engineered receptors that combine a new specificity with an immune cell to target cancer cells. Typically, these receptors graft the specificity of a monoclonal antibody onto a T cell. The receptors are called chimeric because they are fused of parts from different sources. CAR-T cell therapy refers to a treatment that uses such transformed cells for cancer therapy.

[1097] The basic principle of CAR-T cell design involves recombinant receptors that combine antigen-binding and T-cell activating functions. The general premise of CAR-T cells is to artificially generate T-cells targeted to markers found on cancer cells. Scientists can remove T-cells from a person, genetically alter them, and put them back into the patient for them to attack the cancer cells. Once the T cell has been engineered to become a CAR-T cell, it acts as a “living drug”. CAR-T cells create a link between an extracellular ligand recognition domain to an intracellular signaling molecule which in turn activates T cells. The extracellular ligand recognition domain is usually a single-chain variable fragment (scFv). An important aspect of the safety of CAR-T cell therapy is how to ensure that only cancerous tumor cells are targeted, and not normal cells. The specificity of CAR-T cells is determined by the choice of molecule that is targeted.

### III. Cytokine Therapy

[1098] Cytokines are proteins produced by many types of cells present within a tumor. They can modulate immune responses. The tumor often employs them to allow it to grow and reduce the immune response. These immune-modulating effects allow them to be used as drugs to provoke an immune response. Two commonly used cytokines are interferons and interleukins.

### IV. Adoptive T-Cell Therapy

[1099] Adoptive T cell therapy is a form of passive immunization by the transfusion of T-cells (adoptive cell transfer). They are found in blood and tissue and usually activate when they find foreign pathogens. Specifically they activate when the T-cell's surface receptors encounter cells that display parts of foreign proteins on their surface antigens. These can be either infected cells, or antigen presenting cells (APCs). They are found in normal tissue and in tumor tissue, where they are known as tumorinfiltrating lymphocytes (TILs). They are activated by the presence of APCs such as dendritic cells that present tumor antigens. Although these cells can attack the tumor, the environment within the tumor is highly immunosuppressive, preventing immune-mediated tumor death.

[1100] In particular aspects of the present disclosure, a cancer immunotherapy comprises treatment with ipilimumab and nivolumab in combination. In certain aspects of the present disclosure, a cancer immunotherapy comprises treatment with pembrolizumab.

### V. Chemotherapies

[1101] In some aspects, the cancer therapy to be administered to the subject comprises a chemotherapy. Suitable classes of chemotherapeutic agents include (a) Alkylating Agents, such as nitrogen mustards (e.g., mechlorethamine, cylophosphamide, ifosfamide, melphalan, chlorambucil), ethylenimines and methylmelamines (e.g., hexamethylmelamine, thiotepa), alkyl sulfonates (e.g., busulfan), nitrosoureas (e.g., carmustine, lomustine, chlorozoticin, streptozocin) and triazines (e.g., dicarbazine), (b) Antimetabolites, such as folic acid analogs (e.g., methotrexate), pyrimidine analogs (e.g., 5-fluorouracil, floxuridine, cytarabine, azauridine) and purine analogs and related materials (e.g., 6-mercaptopurine, 6-thioguanine, pentostatin), (c) Natural Products, such as vinca alkaloids (e.g., vinblastine, vincristine), epipodophylotoxins (e.g., etoposide, teniposide), antibiotics (e.g., dactinomycin, daunorubicin, doxorubicin, bleomycin, plicamycin and mitoxanthrone), enzymes (e.g., L-asparaginase), and biological response modifiers (e.g., Interferon-α), and (d) Miscellaneous Agents, such as platinum coordination complexes (e.g., cisplatin, carboplatin), substituted ureas (e.g., hydroxyurea), methylhydiazine derivatives (e.g., procarbazine), and adreocortical suppressants (e.g., taxol and mitotane).

### VI. Surgery

[1102] In some aspects, the cancer therapy to be administered to the subject comprises one or more surgeries. Approximately 60% of persons with cancer will undergo surgery of some type, which includes preventative, diagnostic or staging, curative, and palliative surgery. Curative surgery includes resection in which all or part of cancerous tissue is physically removed, excised, and/or destroyed and may be used in conjunction with other therapies, such as the treatment of the present aspects, chemotherapy, radiotherapy, hormonal therapy, gene therapy, immunotherapy, and/or alternative therapies. Tumor resection refers to physical removal of at least part of a tumor. In addition to tumor resection, treatment by surgery includes laser surgery, cryosurgery, electrosurgery, and microscopically-controlled surgery (Mohs' surgery).

[1103] Upon excision of part or all of cancerous cells, tissue, or tumor, a cavity may be formed in the body. Treatment may be accomplished by perfusion, direct injection, or local application of the area with an additional anti-cancer therapy. Such treatment may be repeated, for example, every 1, 2, 3, 4, 5, 6, or 7 days, or every 1, 2, 3, 4, and 5 weeks or every 1, 2, 3, 4, 5, 6, 7, 8, 9, 10, 11, or 12 months. These treatments may be of varying dosages as well.

E7. Exemplary Embodiments for Determining Whether a Patient is not Likely to Benefit from Checkpoint Inhibitor Therapy

[1104] Plasma glycoproteomic biomarkers identify metastatic melanoma patients with reduced clinical benefit from checkpoint inhibitors therapy. The clinical success of immune-checkpoint inhibitors (ICI) in metastatic melanoma has confirmed the validity of therapeutic strategies that boost the immune system to counteract cancer. However, as only about half of patients derive durable clinical benefit, there is a need for assays that can identify non-responders with high accuracy, fast turnaround time and minimal invasiveness. A novel platform was utilized that combines mass spectrometry with an artificial intelligence-based data processing engine to interrogate the blood glycoproteome in melanoma patients before receiving ICI therapy. Independent training, validation and testing cohorts were leveraged to generate a model that predicts immunotherapy response (HR=2.7; P=0.026). The classifier was further validated in an independent cohort and achieved a significant separation of responders and non-responders (HR=5.6; P=0.027). To understand how glycosylation of circulating proteins may affect response to treatment, changes in glycosylation structure were analyzed and a fucosylation signature was discovered in non-responders. A fucosylation-based predictor was developed that stratified effectively patients, supporting the hypothesis that this protein modification directly impacts ICI efficacy. The data demonstrates the utility of the prediction of ICI benefit in patients with malignant melanoma.

[1105] Over the last decade, ICI therapeutics have significantly advanced the clinical management and outcome of patients with a range of malignancies, including metastatic melanoma; yet, only 30-40% of patients obtain sustained clinical benefit from single agent ICI therapy such as pembrolizumab or nivolumab. While combination treatment of nivolumab with ipilimumab has resulted in higher response rates of up to 60%, this is also associated with an incidence of 55% of grade 3-to-4 side effects. Therefore, considerable efforts have been expended to identify predictive biomarkers as companion diagnostics for the early determination of patients who are unlikely to benefit from ICI treatment or may experience severe adverse events, to guide alternative therapies. Assessment of PD-L1 expression in the tumor microenvironment and quantification of tumor mutational burden have found limited utility as indicators of durable clinical benefits. Likewise, a number of other genomic and transcriptomic markers have been investigated as predictors of response of metastatic melanoma to ICI therapies, including HLA-I genotype, neoantigen load and T cell repertoire. In addition, gene expression signatures like immune-predictive score (IMPRES) and IFN-γ-responsive genes expressed in tumors or tumor immune microenvironment (TiME) have been proposed as predictors of ICI response in metastatic melanoma. While these approaches are fruitful, they have yet not demonstrated broad clinical utility as there is debate around their consistency and reproducibility across cohorts.

[1106] The utility of molecular tumor profiling is also limited by the heterogeneity of tumor samples and the availability of adequate tissue obtained through invasive procedures. Liquid biopsies have emerged as a viable alternative to monitor treatment response as they are minimally invasive, convenient for serial sampling, and informative of functional states of immune cells modulated by ICI. Whereas peripheral immune cells and plasma factors contribute to antitumor responses modulated by ICI, previous studies focused on small groups of proteins. Moreover, the impact of post-translational modifications of circulating proteins on ICI response has not been evaluated in a systematic and scalable way to date.

[1107] The plasma glycoproteome of metastatic melanoma patients was interrogated before receiving ICI treatment and using a novel analytical platform that employed machine learning methods to analyze data generated by targeted mass spectrometry. Glycopeptide markers differentially expressed in patients with a short or durable response were identified and used to build a predictor of response to therapy. It should be noted that a durable response in this context means a relatively prolonged response to immunotherapy that is associated with a decreased progression of the melanoma and an improved overall survivability, whereas a short response means a relatively poor response to immunotherapy that is associated with no decreased progression of the melanoma and no improvement to overall survivability.

[1108] A discovery cohort of 202 patients was recruited as part of studies conducted at the Massachusetts General Hospital (MGH) in which patients with metastatic melanoma (stage IV) were treated with first or second-line anti-PD-1 monotherapy or anti-PD-1/anti-CTLA4 combination therapy. Pre-treatment samples were collected under the Institutional Review Board protocols of the Massachusetts General Hospital (protocols 12-488 and 11-181). In this context, pre-treatment samples refer to samples obtained from subject who have not yet received the immunotherapy for this clinical study. Written informed consent was obtained from each patient. Responses to immunotherapy were assessed for overall survival (OS). A validation cohort of 27 patients was recruited as part of studies conducted at the University of South Australia (UniSA) in which patients with metastatic melanoma were treated with first or second-line anti-PD-1 monotherapy or anti-PD-1/anti-CTLA4 combination therapy. Hereinafter, the “discovery cohort” will refer to the samples collected at MGH and the “independent validation cohort” or “external validation cohort” will refer to the samples collected at the UniSA. Written informed consent was obtained from each patient. Plasma was stored at −80° C. and thawed at the time of the glycoproteomic analysis.

[1109] Pooled human plasma (MilliporeSigma, St. Louis, MO) was used for quality control, assay normalization and calibration purposes. Dithiothreitol (DTT) and iodoacetamide (IAA) were purchased from MilliporeSigma (St. Louis, MO). Mass spectrometry grade trypsin/Lys-C protease mix, formic acid, and acetonitrile were purchased from Thermo Fisher Scientific (Waltham, MA).

[1110] Plasma samples were thermally denatured at 100° C. for 5 minutes before they were reduced with DTT, alkylated with IAA, quenched with DTT, and followed by digestion with trypsin/Lys-C protease mix in a water bath at 37° C. for 18 hours. To quench the digestion, formic acid was added to each sample after incubation to a final concentration of 1% (v/v). Digested plasma samples were injected into an Agilent 6495C triple quadrupole mass spectrometer equipped with an Agilent 1290 Infinity ultra-high-pressure liquid chromatography (UHPLC) system and a Waters (Milford, MA) ACQUITY Peptide HSS T3 Column (2.1 mm internal diameter×150 mm length, 1.8 μm particle size). Separation of the peptides and glycopeptides was performed using a 49-min binary gradient. The aqueous mobile phase A was 0.1% formic acid in water (v/v), and the organic mobile phase B was 0.1% formic acid in acetonitrile (v/v). The flow rate was set at 0.5 mL/min. Electrospray ionization was used as the ionization source and was operated in positive ion mode. The triple quadrupole MS was operated in dynamic multiple reaction monitoring (dMRM) mode, with modifications and improvements from a previous method. Samples were injected in a randomized fashion with regard to clinical parameters, and reference pooled plasma samples were injected interspersed with test samples to allow for correction of within-run drift of baseline signal.

[1111] PB-NET, a peak integration software that had been developed in-house, was used to integrate peaks and obtain raw abundances for peptides and glycopeptides. Raw abundance for peptide markers was normalized by using spiked-in heavy isotope-labeled internal standards with known peptide concentrations for each protein. Relative abundance was determined for a glycopeptide by calculating the quotient of a raw abundance signal intensity of the glycopeptide and the raw abundance of a corresponding non-glycosylated peptide from the same protein. For glycopeptides having the same peptide sequence with more than two glycan types identified at a given glycosylation site, site occupancy was determined for a particular glycopeptide by calculating its fractional abundance across all glycan types observed at that site. It should be noted that each glycan type represents a unique combination of saccharide units that is attached to a same glycosylation site of a particular peptide sequence. For each glycopeptide biomarker, the product of its site occupancy or relative abundance and corresponding peptide concentration was used to calculate approximate glycopeptide concentration, also referred to as normalized abundance. Concentration was determined for 521 glycopeptides, 443 of which are based on site occupancy and 78 on relative abundance, and for 75 peptides, totaling 596 unique concentration-normalized biomarkers. Relative abundance was determined for 532 unique glycopeptides. Univariate age- and sex-adjusted Cox regression with respect to overall survival % (OS) was performed using both relative abundance-normalized features and concentration-normalized features to determine a set of glycopeptides and non-glycosylated peptides that are significantly associated with OS.

[1112] The sample set was randomly divided and stratified by immunotherapy regimen, melanoma subtype, and early failure (progressed or died within 6 months of treatment start)/sustained control (progression and death-free within 3 years of treatment start) status. 40% of the sample set was used as a training set, 30% was used as a validation set on which to tune model hyperparameters, and the remaining 30% was used as an independent testing set. Allocation of samples into the three sets (training, validation, and test) was sufficiently balanced across all demographic and clinical covariates listed in Table 22A (confirmed by Chi-squared, Fisher's Exact, Student t, or Wilcoxon rank-based tests as appropriate). A five-fold repeated cross-validated LASSO-regularized Cox regression model was employed on the training set, yielding a set of 14 biomarkers, including 13 glycopeptides and one non-glycosylated peptide (Tables 23A-D). A risk score threshold by which to divide the cohort into “likely ICI responders” and “non-responders” was chosen via Harrell's c-index to optimize sensitivity for non-response in the validation set. The identical threshold was used in the independent test set and in the external validation cohort. All analyses were conducted in R version 4.2.2 (Vienna, Austria).

TABLE 22A
Demographic and clinical covariates in the discovery cohort. Counts are followed by the
appropriate column-wise percentage, while continuous variables are summarized by medians
and either IQRs or, for time to event variables, 95% confidence limits (NR = not reached).

| Variable | Full cohort | Training set | Validation set | Test set |
|---|---|---|---|---|
| Sample size | 202 | 79 (39) | 59 (29) | 64 (32) |
| Female sex | 63 (31) | 27 (34) | 16 (27) | 20 (31) |
| Age, yrs. (continuous) | 65 (57, 73) | 67 (57, 72) | 64 (56, 74.5) | 63.5 (57, 72.2) |
| Current ICI treatment | | | | |
| Pembrolizumab monotherapy | 109 (54) | 43 (54) | 32 (54) | 34 (53) |
| Nivolumab with/without | 93 (46) | 36 (46) | 27 (46) | 30 (47) |
| ipilimumab combination | | | | |
| Survival-related events | | | | |
| Progression (PFS) event | 145 (72) | 57 (72) | 40 (68) | 48 (75) |
| Death (OS) event | 113 (56) | 42 (53) | 32 (54) | 39 (61) |
| Next treatment event | 83 (41) | 30 (38) | 22 (37) | 31 (48) |
| Time to event, mos. | | | | |
| (continuous) | | | | |
| Progression | 5.5 (3.0, 9.9) | 6.9 (3.3, 23.9) | 8.4 (2.7, 30.4) | 3.2 (2.5, 9.3) |
| Death | 40.1 (27.3, 59.0) | 50.4 (30.3, NR) | 36.1 (14.3, NR) | 28.8 (16.2, NR) |
| BRAF status | | | | |
| Negative | 67 (33) | 22 (28) | 18 (31) | 27 (42) |
| V600 | 57 (28) | 20 (25) | 16 (27) | 21 (33) |
| Non-V600 | 9 (4) | 2 (3) | 2 (3) | 5 (8) |
| Mutant | 1 (0) | 0 (0) | 0 (0) | 1 (2) |
| Positive/wild type | 121 (60) | 49 (62) | 35 (59) | 37 (58) |
| Missing | 14 (7) | 8 (10) | 6 (10) | 0 (0) |
| LDH, units/L (continuous) | 206 (167, 281) | 218 (168.8, 284.8) | 206 (167, 274) | 191.5 (164.8, 276.8) |
| LDH (categorical) | | | | |
| <ULN | 105 (52) | 36 (46) | 29 (49) | 40 (62) |
| 1-2xULN | 63 (31) | 28 (35) | 22 (37) | 13 (20) |
| >2xULN | 27 (13) | 12 (15) | 6 (10) | 9 (14) |
| Missing | 7 (3) | 3 (4) | 2 (3) | 2 (3) |
| M Stage | | | | |
| M0 | 16 (8) | 7 (9) | 5 (8) | 4 (6) |
| M1 | 186 (92) | 72 (91) | 54 (92) | 60 (94) |
| M1a | 9 (4) | 3 (4) | 2 (3) | 4 (6) |
| M1b | 31 (15) | 17 (22) | 5 (8) | 9 (14) |
| M1c | 84 (42) | 28 (35) | 30 (51) | 26 (41) |
| M1d | 62 (31) | 24 (30) | 17 (29) | 21 (33) |
| ECOG performance status | | | | |
| 0 | 119 (59) | 49 (62) | 34 (58) | 36 (56) |
| 1 | 67 (33) | 24 (30) | 19 (32) | 24 (38) |
| ≥2 | 14 (7) | 5 (6) | 6 (10) | 3 (5) |
| Missing | 2 (1) | 1 (1) | 0 (0) | 1 (2) |
| Melanoma subtype | | | | |
| Cutaneous | 127 (63) | 51 (65) | 37 (63) | 39 (61) |
| Mucosal | 20 (10) | 8 (10) | 5 (8) | 7 (11) |
| Uveal | 15 (7) | 6 (8) | 5 (8) | 4 (6) |
| Acral | 5 (2) | 1 (1) | 1 (2) | 3 (5) |
| Unknown primary | 35 (17) | 13 (16) | 11 (19) | 11 (17) |
| Line of therapy | | | | |
| First-line | 147 (73) | 61 (77) | 44 (75) | 42 (66) |
| Second-line or later | 54 (27) | 17 (22) | 15 (25) | 22 (34) |
| Missing | 1 (0) | 1 (1) | 0 (0) | 0 (0) |

TABLE 22B
Demographic and clinical covariates in the discovery cohort stratified by classifier
prediction. Counts are followed by the appropriate column-wise percentage,
while continuous variables are summarized by medians and either IQRs or, for
time to event variables, 95% confidence limits (NR = not reached).

| Variable | Full cohort | Likely to benefit | Unlikely to benefit |
|---|---|---|---|
| Sample size | 202 | 179 (89) | 23 (11) |
| Female sex | 63 (31) | 56 (31) | 7 (30) |
| Age, yrs. (continuous) | 65 (57, 73) | 65 (56.5, 73) | 68 (59.5, 78.5) |
| Current ICI treatment | | | |
| Pembrolizumab monotherapy | 109 (54) | 98 (55) | 11 (48) |
| Nivolumab with/without | 93 (46) | 81 (45) | 12 (52) |
| ipilimumab combination | | | |
| Survival-related events | | | |
| Progression (PFS) event | 145 (72) | 124 (69) | 23 (91) |
| Death (OS) event | 113 (56) | 92 (51) | 23 (91) |
| Next treatment event | 83 (41) | 76 (42) | 7 (30) |
| Time to event, mos. | | | |
| (continuous) | | | |
| Progression | 5.5 (3.0, 9.9) | 7.6 (4.0, 16.9) | 2.1 (1.3, 3.0) |
| Death | 40.1 (27.3, 59.0) | 54.3 (37.9, NR) | 3.7 (2.4, 10.8) |
| BRAF status | | | |
| Negative | 67 (33) | 63 (35) | 4 (17) |
| V600 | 57 (28) | 53 (30) | 4 (17) |
| Non-V600 | 9 (4) | 9 (5) | 0 (0) |
| Mutant | 1 (0) | 1 (1) | 0 (0) |
| Positive/wild type | 121 (60) | 104 (58) | 17 (74) |
| Missing | 14 (7) | 12 (7) | 2 (9) |
| LDH, units/L (continuous) | 206 (167, 281) | 200 (166, 266.8) | 357 (210, 792) |
| LDH (categorical) | | | |
| <ULN | 105 (52) | 99 (55) | 6 (26) |
| 1-2xULN | 63 (31) | 57 (32) | 6 (26) |
| >2xULN | 27 (13) | 16 (9) | 11 (48) |
| Missing | 7 (3) | 7 (4) | 0 (0) |
| M Stage | | | |
| M0 | 16 (8) | 15 (8) | 1 (4) |
| M1 | 186 (92) | 164 (92) | 22 (96) |
| M1a | 9 (4) | 8 (4) | 1 (4) |
| M1b | 31 (15) | 30 (17) | 1 (4) |
| M1c | 84 (42) | 73 (41) | 11 (48) |
| M1d | 62 (31) | 53 (30) | 9 (39) |
| ECOG performance status | | | |
| 0 | 119 (59) | 113 (63) | 6 (26) |
| 1 | 67 (33) | 58 (32) | 9 (39) |
| ≥2 | 14 (7) | 8 (4) | 6 (26) |
| Missing | 2 (1) | 0 (0) | 2 (9) |
| Melanoma subtype | | | |
| Cutaneous | 127 (63) | 116 (65) | 11 (48) |
| Mucosal | 20 (10) | 18 (10) | 2 (9) |
| Uveal | 15 (7) | 12 (7) | 3 (13) |
| Acral | 5 (2) | 5 (3) | 0 (0) |
| Unknown primary | 35 (17) | 28 (16) | 7 (30) |
| Line of therapy | | | |
| First-line | 147 (73) | 131 (73) | 16 (70) |
| Second-line or later | 54 (27) | 48 (27) | 6 (26) |
| Missing | 1 (0) | 0 (0) | 1 (4) |

[1113] In some embodiments, provided herein are methods for determining whether a subject diagnosed with melanoma will benefit from immunotherapy comprising detecting one or more biomarkers. In some embodiments, the one or more biomarkers comprise one or more glycopeptides. In some embodiments, the one or more biomarkers comprises one or more peptide structures set forth in Table 23A. In some embodiments, the method comprises detecting one or more peptides comprising a sequence set forth in SEQ ID NOs: 95-108. In some embodiments, the peptides of Table 23A can comprise a glycan with the symbol structure or composition noted in Table 23C.

TABLE 23A
Peptide Structures Associated with Likelihood of Benefit of
Immunotherapy in Melanoma Patients

| | | | | Linking | Linking | |
|---|---|---|---|---|---|---|
| | | | | Site | Site | |
| | | | | Position | Position | |
| (Peptide) | | | | within | within | Glycan |
| SEQ ID | | Uniprot | | Protein | Peptide | Structure |
| NO. | PS-NAME | ID | Peptide sequence | Sequence | Sequence | GL NO. |
| 4495 | A1AT_107_5412 | P01009 | ADTHDEILEGLNFNL | 107 | 14 | 5412 |
| | | | TEIPEAQIHEGFQELL | | | |
| | | | R | | | |
| 4596 | A1AT_107_6503 | P01009 | ADTHDEILEGLNFNL | 107 | 14 | 6503 |
| | | | TEIPEAQIHEGFQELL | | | |
| | | | R | | | |
| 4697 | AACT_106_6503 | P01011 | FNLTETSEAEIHQSF | 106 | 2 | 6503 |
| | | | QHLLR | | | |
| 4798 | AGP12_72MC_6503 | P02763 | SVQEIQATFFYFTPN | 72 | 15 | 6503 |
| | | or | KTEDTIFLR | | | |
| | | P19652 | | | | |
| 4899 | AGP12_72MC_7602 | P02763 | SVQEIQATFFYFTPN | 72 | 15 | 7602 |
| | | or | KTEDTIFLR | | | |
| | | P19652 | | | | |
| 49100 | APOB_3411_5401 | P04114 | FVEGSHNSTVSLTTK | 3411 | 7 | 5401 |
| 50101 | APOM_135_NONG | O95445 | TELFSSSCPGGIMLN | N/A | N/A | N/A |
| | LYCOSYLATED | | ETGQGYQR | | | |
| 51102 | CFAH_882_5411 | P08603 | IPCSQPPQIEHGTIN | 882 | 15 | 5411 |
| | | | SSR | | | |
| 52103 | CLUS_291_5401 | P10909 | HNSTGCLR | 291 | 2 | 5401 |
| 53104 | IGG1_297_5412 | P01857 | EEQYNSTYR | 180 | 5 | 5412 |
| 54105 | IGG2_297_5401 | P01859 | EEQFNSTFR | 176 | 5 | 5401 |
| 55106 | KLKB1_308_5401 | P03952 | IYPGVDFGGEELNVT | 308 | 13 | 5401 |
| | | | FVK | | | |
| 56107 | KLKB1_494_5410 | P03952 | LQAPLNYTEFQKPIC | 494 | 6 | 5410 |
| | | | LPSK | | | |
| 57108 | FINC_SYTITGLQPGT | P02751 | SYTITGLQPGTDYK | N/A | N/A | N/A |
| | DYK | | | | | |

TABLE 23B
LC-MRM-MS parameters for peptide structures associated with Patients Having
Melanoma that are Unlikely or Likely to Benefit with Immunotherapy

| (Peptide) | | | Collision | 1st | 1st | 1st | 2nd |
|---|---|---|---|---|---|---|---|
| SEQ | Monoisotopic | RT | Energy | Precursor | Precursor | Product | Product |
| ID NO. | mass (g/mole) | (min) | (V) | m/z | charge | m/z | m/z |
| 4495 | 6041.646782 | 42.8 | 30 | 1209.8 | 5 | 366.1 | 1299 |
| 4596 | 6551.816474 | 43.3 | 33 | 1311.8 | 5 | 366.1 | 1299 |
| 4697 | 5260.186906 | 37.9 | 30 | 1053.4 | 5 | 274.1 | N/A |
| 4798 | 5755.448988 | 41 | 28 | 1152.7 | 5 | 366.1 | 1550.3 |
| 4899 | 5829.485766 | 40.5 | 25 | 1458.9 | 4 | 366.1 | 1550.3 |
| 49100 | 3519.476794 | 12.5 | 30 | 1174.2 | 3 | 366.1 | N/A |
| 50101 | 2531.142012 | 31.1 | 28 | 845.3 | 3 | 1052.5 | 523.3 |
| 51102 | 4079.71446 | 14.8 | 25 | 1021.4 | 4 | 366.1 | N/A |
| 52103 | 2857.106354 | 4.9 | 24 | 953.4 | 3 | 366.1 | N/A |
| 53104 | 3539.335 | 8.6 | 40 | 1181.1 | 3 | 204.1 | N/A |
| 54105 | 3070.191856 | 14 | 30 | 1024.7 | 3 | 204.1 | 1360.6 |
| 55106 | 3896.675884 | 37 | 20 | 975.7 | 4 | 366.1 | N/A |
| 56107 | 4014.816354 | 30.4 | 20 | 1004.7 | 4 | 366.1 | N/A |
| 57108 | 1542.756554 | 22.7 | 22 | 772.4 | 2 | 680.3 | 978.4 |

TABLE 23C
Glycan symbol structure and glycan composition that corresponds to the
glycan structure GL NO in Table 23A

| Glycan Structure GL | Glycan Symbol | |
|---|---|---|
| NO. | Structure | Glycan Composition |
| 5401 | [chemical structure] | Hex(5)HexNAc(4)Fuc(0)NeuAc(1) |
| 5410 | [chemical structure] | Hex(5)HexNAc(4)Fuc(1)NeuAc(0) |
| 5411 | [chemical structure] | Hex(5)HexNAc(4)Fuc(1)NeuAc(1) |
| 5412 | [chemical structure] | Hex(5)HexNAc(4)Fuc(1)NeuAc(2) |
| 6503 | [chemical structure] | Hex(6)HexNAc(5)Fuc(0)NeuAc(3) |
| 7602 | [chemical structure] | Hex(7)HexNAc(6)Fuc(0)NeuAc(2) |

Legend for Table 19

[symbol]

Glc

[symbol]

Gal

[symbol]

Man

[symbol]

Fuc

[symbol]

NeuSAc

[symbol]

GlcNAc

[symbol]

GalNAc

[symbol]

ManNAc

TABLE 23D
Coefficients for each marker used in the regression models

| (Peptide) | | | |
|---|---|---|---|
| SEQ ID | | Uniprot | |
| NO. | PS-NAME | ID | Coeficients |
| 4495 | A1AT_107_5412 | P01009 | 0.164329 |
| 4596 | A1AT_107_6503 | P01009 | 0.001652 |
| 4697 | AACT_106_6503 | P01011 | 0.021662 |
| 4798 | AGP12_72MC_6503 | P02763 | 0.079666 |
| | | or | |
| | | P19652 | |
| 4899 | AGP12_72MC_7602 | P02763 | 0.076526 |
| | | or | |
| | | P19652 | |
| 49100 | APOB_3411_5401 | P04114 | −0.01875 |
| 50101 | APOM_135_{—} | O95445 | −0.04415 |
| | NONGLYCOSYLATED | | |
| 51102 | CFAH_882_5411 | P08603 | −0.02179 |
| 52103 | CLUS_291_5401 | P10909 | −0.16244 |
| 53104 | IGG1_297_5412 | P01857 | −0.02911 |
| 54105 | IGG2_297_5401 | P01859 | 0.078805 |
| 55106 | KLKB1_308_5401 | P03952 | −0.08128 |
| 56107 | KLKB1_494_5410 | P03952 | 0.138484 |
| 57108 | FINC_{—} | P02751 | −0.07506 |
| | SYTITGLQPGTDYK | | |

[1114] Glycopeptides with differences in relative abundance in relation to OS were analyzed by type of glycans. Asparagine (N)-linked glycans and O-linked glycopeptides were further separated based on the number of hexose, N-acetylhexosamine, fucose, or sialic acid units. A site-specific monomer weight feature for N-glycopeptides was calculated by determining the average number of a specific monosaccharide at a given glycosylation site, weighted by glycan species site occupancy. A five-fold repeated cross-validated LASSO-regularized Cox regression model based only on fucose-dependent engineered features that achieved FDR<0.05 in univariate age- and sex-adjusted Cox regression was developed, and a risk score threshold was chosen using the same method as described above. The same training, validation, and test set were used as in the other cross-validated Cox model described above.

[1115] Responses to immunotherapy were assessed for overall survival (OS). The discovery cohort is composed of 69% male with a median age of 65 (IQR: 57, 73). 73% of patients were to undergo first-line therapy at time of sample collection, with 72% of patients experiencing a progression, 41% having a time recorded at which an additional treatment regimen was initiated, and 56% having a recorded death. Median time to progression for this cohort was 5.5 months (95% CI: 3.0, 9.9), while median time to death was over three years, at 40.1 months (95% CI: 27.3, 59.0) (FIG. 46). 63% of patients had cutaneous melanoma and 17% had melanoma of unknown primary, while the remainder were either characterized as mucosal, uveal, or acral subtype. At the start of treatment, 73% of the cohort was staged as either M1c or M1d, 60% of patients were wild type BRAF, 44% had lactate dehydrogenase (LDH, units/L) value that exceeded the upper limit of normal (ULN), and 40% had an ECOG performance status above 0 (Table 22A). As expected, patients with non-cutaneous melanoma, higher LDH, higher ECOG performance status, or are BRAF mutants exhibit shorter median time to death (FIGS. 49A-D). The ECOG Performance Status Scale is a standard criteria that describes a patient's level of functioning in terms of their ability to care for themself, daily activity, and physical ability (walking, working, etc.). A higher ECOG value corresponds to a patient having a more limited daily living ability whereas a lower ECOG value (e.g., 0) corresponds to a more active patient able to carry on daily activities with fewer or no restriction.

[1116] The independent validation cohort used for additional confirmation of the predictor is composed of 70% male with a median age of 71 (IQR: 66, 81) as shown in Table 24. 85% of patients were to undergo pembrolizumab monotherapy, with 37% of patients experiencing a progression and 33% having a recorded death. Best overall response was determined, with 38% of the cohort having at least a partial response to therapy. Median time to progression for this cohort was not reached (95% CI: 9.9, NR) while median time to death was 18.6 months (95% CI: 15.8, NR) (Table 24). While this cohort has less follow-up than the discovery cohort, the distributions are comparable (FIG. 46B).

TABLE 24
Demographic and clinical covariates in the independent validation
cohort. Counts are followed by the appropriate column-wise
percentage, while continuous variables are summarized by
medians and either IQRs or, for time to event variables,
95% confidence limits (NR = not reached).

| Variable | Full cohort |
|---|---|
| Sample size | 27 |
| Female sex | 8 (30) |
| Age, yrs. (continuous) | 71 (66, 81) |
| Current ICI treatment | |
| Pembrolizumab monotherapy | 23 (85) |
| Ipilimumab/nivolumab combination | 4 (15) |
| Survival-related events | |
| Progression (PFS) event | 10 (37) |
| Death (OS) event | 9 (33) |
| Time to event, mos. | |
| (continuous) | |
| Progression | NR (9.9, NR) |
| Death | 18.6 (15.8, NR) |
| Best overall response | |
| Complete response | 5 (19) |
| Partial response | 5 (19) |
| Stable disease | 6 (22) |
| Progressive disease | 9 (33) |
| Missing | 2 (7) |

[1117] The identification of glycopeptide biomarkers associated with overall survival and early failure was described. Peptides and glycopeptides derived from 75 plasma proteins were quantified and univariate age- and sex-adjusted Cox regression were applied to identify biomarkers associated with OS. The label “early failure” (EF) was assigned to patients who progressed and died within 6 months of starting ICI treatment (n=40), “sustained control” (SC) was assigned to patients who neither progressed nor died in the first three years after ICI treatment start (n=56), and “other” was assigned otherwise (n=106) (FIGS. 50A-B). When representing 143 differentially expressed biomarkers between the EF and SC groups at FDR<0.05 in a hierarchically-clustered heatmap, drastic differences were observed in their glycoproteomic profile.

[1118] The generation of a classifier to predict ICI benefit was described. A LASSO-regularized Cox-based classifier for prediction of individuals likely to benefit from ICI therapy was generated: from 64 biomarker features associated with OS (FDR<0.05), 14 were retained (13 glycopeptides and one non-glycosylated peptide), and achieved an unadjusted HR=5.1 (P=7.6×10⁻¹¹) in the full discovery cohort, HR=10.3 (P=4.5×10⁻⁹) in the training set, HR=3.9 (P=0.012) in the validation set, and HR=2.7 (P=0.026) in the test set (Table 25, FIGS. 47A-D). In the full discovery cohort, 92 of the 179 patients classified as likely to benefit from ICI therapy died (51%), whereas 21 of 23 patients classified as unlikely to benefit died (91%), suggesting the classifier has a high sensitivity to detect likely non-responders. In the independent test set, the proportions shift to 58% and 86%, respectively.

TABLE 25
Performance of repeated five-fold cross-validated LASSO-regularized Cox
regression-based classifier using 14 concentration-normalized features

| | | | | |
|---|---|---|---|---|
| Classifier prediction | Events/N | Median OS (95% CI) | HR (95% CI) | P-value |

Full discovery cohort (n = 202)

| Likely to benefit | 92/179 | 54.3 (37.9, NR) | Reference | |
|---|---|---|---|---|
| Unlikely to benefit | 21/23 | 3.7 (2.4, 10.8) | 5.1 (3.1, 8.4) | 7.6 × 10⁻¹¹ |

Discovery: training set (n = 79)

| Likely to benefit | 31/67 | 55.2 (42.6, NR) | Reference | |
|---|---|---|---|---|
| Unlikely to benefit | 11/12 | 2.5 (1.2, NR) | 10.3 (4.7, 22.6) | 4.5 × 10⁻⁹ |

Discovery: validation set (n = 59)

| Likely to benefit | 28/55 | 54.8 (16.3, NR) | Reference | |
|---|---|---|---|---|
| Unlikely to benefit | 4/4 | 5.8 (2.9, NR) | 3.9 (1.4, 11.4) | 0.012 |

Discovery: test set (n = 64)

| Likely to benefit | 33/57 | 30.2 (16.4, NR) | Reference | |
|---|---|---|---|---|
| Unlikely to benefit | 6/7 | 6.0 (2.4, NR) | 2.7 (1.1, 6.6) | 0.026 |

Discovery: validation + test set (n = 123)

| Likely to benefit | 61/112 | 40.6 (24.8, NR) | Reference | |
|---|---|---|---|---|
| Unlikely to benefit | 10/11 | 6.0 (3.3, NR) | 3.2 (1.6, 6.3) | 8.2 × 10⁻⁴ |

Independent validation cohort (n = 27)

| Likely to benefit | 6/23 | NR (15.8, NR) | Reference | |
|---|---|---|---|---|
| Unlikely to benefit | 3/4 | 6.0 (2.4, NR) | 5.6 (1.2, 25.5) | 0.027 |

[1119] The statistical significance was estimated in univariate Cox regression analyses of all demographic and clinical variables with and without adjustment. This was then used for variable selection and adjustment in the multivariable Cox regression analysis. Age, BRAF status, categorical LDH group, ECOG performance status, M stage, melanoma subtype, and line of therapy all achieved P<0.15 in both analyses (Table 27). Multivariable Cox regression analysis was then performed using the classifier prediction group as the primary independent variable and adjusting for the previously listed variables (Table 26). When applied to the full cohort, this model predicted that the risk of death for a patient that is classified as unlikely to benefit from ICI therapy based on their glycoproteomic risk score is about 3.4 times higher than if they were classified as likely to benefit, adjusting for the demographic and clinical variables (95% CI: 1.9, 6.1). Interestingly, variables such as age, categorical LDH group, ECOG performance status, subtype, and line of therapy generated models that were significant (P<0.05) without the inclusion of the classifier prediction variable. However, when the classifier prediction variable was included, the only predictors that remain statistically significant were classifier prediction (P=6.3×10⁻⁵), melanoma subtype (P=5.1×10⁻⁴), and line of therapy (P=5.9×10⁻³) (Table 26). Using a likelihood ratio test to compare these two multivariable Cox models, there is sufficient evidence that the model that includes the classifier prediction provides a significantly better fit than the model without it (P=2.0×10⁻⁴).

TABLE 26
Performance of Cox regression-based classifier in the discovery cohort with
multivariable adjustments. Small N in certain variable subgroups merits
combining the validation and test sets for the purposes of this table.

| | | | | | Validation + test sets | |
|---|---|---|---|---|---|---|
| | Full cohort (n = 202) | | Training set (n = 79) | | (n = 123) | |
| Variable | HR (95% CI) | P-value | HR (95% CI) | P-value | HR (95% CI) | P-value |
| Classifier prediction | 3.355 | 6.3 × 10⁻⁵ | 5.453 | 4.3 × 10⁻³ | 2.128 | 0.073 |
| (unlikely to benefit) | (1.854, 6.069) | | (1.704, 17.449) | | (0.931, 4.861) | |
| Age (continuous | 1.017 | 0.081 | 1.031 | 0.066 | 1.007 | 0.567 |
| years) | (0.998, 1.035) | | (0.998, 1.065) | | (0.983, 1.031) | |
| Positive BRAF | 1.197 | 0.455 | 1.187 | 0.704 | 1.266 | 0.439 |
| status (ref: | (0.747, 1.917) | | (0.490, 2.875) | | (0.696, 2.302) | |
| negative) | | | | | | |
| LDH category | | 0.328 | | 0.009 | | 0.396 |
| <ULN | Reference | | | | | |
| 1-2 × ULN | 1.073 | 0.762 | 0.955 | 0.916 | 0.994 | 0.983 |
| | (0.682, 1.688) | | (0.405, 2.254) | | (0.555, 1.779) | |
| >2 × ULN | 1.715 | 0.082 | 4.151 | 0.031 | 1.604 | 0.232 |
| | (0.934, 3.15) | | (1.143, 15.073) | | (0.739, 3.479) | |
| ECOG performance | | 0.222 | | 0.236 | | 0.007 |
| status | | | | | | |
| 0 | Reference | | | | | |
| 1 | 1.375 | 0.147 | 1.564 | 0.232 | 1.478 | 0.176 |
| | (0.894, 2.115) | | (0.751, 3.256) | | (0.839, 2.605) | |
| ≥2 | 1.941 | 0.084 | 0.374 | 0.282 | 5.511 | 1.2 × 10⁻⁴ |
| | (0.914, 4.121) | | (0.062, 2.245) | | (2.314, 13.127) | |
| M1 stage (ref: M0) | 2.146 | 0.109 | 1.744 | 0.429 | 4.932 | 0.033 |
| | (0.843, 5.464) | | (0.439, 6.928) | | (1.138, 21.375) | |
| Non-cutaneous | 2.00 | 5.1 × 10⁻⁴ | 3.026 | 3.5 × 10⁻³ | 1.528 | 0.118 |
| subtype (ref: | (1.353, 2.957) | | (1.44, 6.358) | | (0.898, 2.599) | |
| cutaneous) | | | | | | |
| Not first-line therapy | 1.841 | 5.9 × 10⁻³ | 1.981 | 0.112 | 2.073 | 7.8 × 10⁻³ |
| (ref: first-line) | (1.192, 2.842) | | (0.853, 4.603) | | (1.212, 3.548) | |

TABLE 27
Univariate Cox regression with respect to OS without and with adjustment
for classifier prediction (likely/unlikely to benefit) in full discovery
cohort; variables significant at P < 0.15 in both frameworks (marked
with an asterisk) are included in multivariable modeling shown in Table
25. Global p-values for categorical variables take missing values into account.

| | Without adjustment | | With adjustment | |
|---|---|---|---|---|
| Variable | HR (95% CI) | P-value | HR (95% CI) | P-value |
| Age (continuous years)* | 1.018 (1.003, 1.033) | 0.017 | 1.015 (1.00, 1.03) | 0.057 |
| Female sex (ref: male) | 0.851 (0.574, 1.262) | 0.422 | 0.759 (0.509, 1.13) | 0.174 |
| Pembrolizumab | 0.89 (0.615, 1.289) | 0.539 | 0.935 (0.645, 1.355) | 0.722 |
| treatment (ref: ipi/nivo) | | | | |
| Positive BRAF status | 1.452 (0.957, 2.202) | 0.08 | 1.394 (0.918, 2.117) | 0.119 |
| (ref: negative)* | | | | |
| LDH category* | | 7.3 × 10⁻³ | | 0.101 |
| <ULN | Reference | | | |
| 1-2xULN | 1.417 (0.939, 2.138) | 0.097 | 1.382 (0.916, 2.086) | 0.123 |
| >2xULN | 2.711 (1.579, 4.656) | 3.0 × 10⁻⁴ | 2.007 (1.142, 3.53) | 0.016 |
| ECOG performance | | 2.2 × 10⁻⁴ | | 0.112 |
| status* | | | | |
| 0 | Reference | | | |
| 1 | 1.353 (0.905, 2.022) | 0.14 | 1.307 (0.874, 1.955) | 0.193 |
| ≥2 | 4.352 (2.305, 8.216) | 5.8 × 10⁻⁶ | 2.372 (1.167, 4.823) | 0.017 |
| M1 stage (ref: M0)* | 2.43 (0.99, 5.963) | 0.053 | 2.284 (0.930, 5.609) | 0.072 |
| Non-cutaneous | 2.149 (1.479, 3.121) | 5.9 × 10⁻⁵ | 2.099 (1.444, 3.052) | 1.0 × 10⁻⁴ |
| subtype (ref: | | | | |
| cutaneous)* | | | | |
| Not first-line therapy | 1.352 (0.906, 2.018) | 0.14 | 1.434 (0.958, 2.144) | 0.08 |
| (ref: first-line)* | | | | |

[1120] Next, the Cox-based classifier was applied based on 14 markers to an independent cohort of 27 patient samples. Remarkably, the model achieved comparable separability between the likely and unlikely to benefit classification groups relative to the discovery cohort (HR=5.6; P=0.027) (FIG. 47E; Table 25). Notably, all four patients classified as unlikely to benefit from ICI therapy recorded progressive disease as best overall response, and three died (75%) (Table 28). Of the 23 patients who were classified as likely to benefit, 6 died (26%). Although the cohort was small in sample size, these data indicate that the classifier demonstrates high sensitivity to detect non-responders (Table 25).

TABLE 28
Demographic and clinical covariates in the external validation cohort stratified
by classifier prediction. Counts are followed by the appropriate column-wise
percentage, while continuous variables are summarized by medians and either IQRs
or, for time to event variables, 95% confidence limits (NR = not reached).

| Variable | Full cohort | Likely to benefit | Unlikely to benefit |
|---|---|---|---|
| Sample size | 27 | 23 (85) | 4 (15) |
| Female sex | 8 (30) | 8 (35) | 0 (0) |
| Age, yrs. (continuous) | 71 (66, 81) | 70 (65.5, 81) | 74.5 (70.5, 79.5) |
| Current ICI treatment | | | |
| Pembrolizumab monotherapy | 23 (85) | 19 (83) | 4 (100) |
| Ipilimumab/nivolumab combination | 4 (15) | 4 (17) | 0 (0) |
| Survival-related events | | | |
| Progression (PFS) event | 10 (37) | 6 (26) | 4 (100) |
| Death (OS) event | 9 (33) | 6 (26) | 3 (75) |
| Time to event, mos. | | | |
| (continuous) | | | |
| Progression | NR (9.9, NR) | NR (15.8, NR) | 2.6 (1.4, NR) |
| Death | 18.6 (15.8, NR) | NR (15.8, NR) | 6.0 (2.4, NR) |
| Best overall response | | | |
| Complete response | 5 (19) | 5 (22) | 0 (0) |
| Partial response | 5 (19) | 5 (22) | 0 (0) |
| Stable disease | 6 (22) | 6 (26) | 0 (0) |
| Progressive disease | 9 (33) | 5 (22) | 4 (100) |
| Missing | 2 (7) | 2 (9) | 0 (0) |

[1121] The fucosylation of N-glycopeptide biomarkers that are associated with reduced clinical benefit of ICI therapy was described. Biomarkers showing statistically significant differences in relative abundance in respect to OS (P<0.05) were selected for further structural analysis. Among the 114 markers, 91 were N-glycopeptides, all carrying complex-type glycans. Strikingly, when looking at fucose content, these markers separated in two distributions that reflected the benefit of treatment (FIG. 48A1), with fucosylated glycopeptides prevalent in patients with disease progression. Increased fucosylation has been described at the tumor site and has been linked to increased metastatic potential, modulation of TGF-beta signaling that is known to impact the distribution of T cells in the tumor, as well as PD-1 stability at the cell surface. Next, the sialic acid content in the same markers was analyzed, as alterations in sialic acid density in tumor cells have been extensively described in connection with inhibition of immune cell function. However, there was no correlation between the number of sialic acid units and benefit of ICI treatment (FIG. 48A2). Other mechanisms, including expression of the asialoglycoprotein receptor, might contribute to maintaining a homogeneous level of sialylation in circulating glycoproteins. Instead, a correlation was observed between the number of sialic units in O-linked glycopeptides and the reduced benefit of treatment (FIG. 48B); however, only a small number of O-glycopeptides were included in the panel. These species most likely correspond to disialylated core-1 O-glycan tetrasaccharides that contribute to binding of the immune-suppressive receptor Siglec-7 found on natural killer cells. Access to non-glycosylated forms of the peptides allowed us to also evaluate the relevance of site occupancy: as N-glycans are involved in protein folding and can prevent interactions with other proteins, changes in site occupancy may dramatically change protein activity. Interestingly, alpha1-antitrypsin (A1AT) and hemopexin exhibited opposite association with response to treatment in respect to site occupancy (FIG. 48C). Glycosylation of A1AT was described to affect binding to IL-8 and neutrophil activation.

[1122] To test the validity of this observation, site-specific glycosylation features that represent the average number of specific monosaccharides at a given site, weighted by glycopeptide occupancy. Of 51 fucose-dependent features across our full research assay, 11 were strongly associated with benefit from ICI therapy based on univariate age- and sex-adjusted Cox regression analysis (FIG. 48D). All 11 features were ultimately retained in a repeated cross-validated LASSO-regularized Cox regression model on a training set consisting of 40% of the cohort, yielding a hazard ratio of 2.9 (P=0.016) (FIG. 48E2). A validation set consisting of 30% of the cohort was used to tune model hyperparameters (FIG. 48E3). When applied to the remaining 30% of the cohort, this tuned model resulted in a HR of 3.5 (P=6.6×10⁻³) (FIG. 48E4). Altogether, these data support the notion that the fucosylation status of circulating glycoproteins is a critical parameter that stratifies patients based on the response to ICI therapy.

[1123] The group of site monomers in Tables 14 include site monomers that have been determined relevant to distinguishing at least between immunotherapy responsive melanoma and immunotherapy nonresponsive melanoma. For example, the group of site monomers may be used to predict the probability of having immunotherapy responsive melanoma for use in informing treatment decisions. In one or more embodiments, the at least 1 site monomer includes at least 1, at least 2, at least 3, at least 4, at least 5, or more of the site monomers listed in Table 29.

TABLE 29
Markers (Site Monomers) Associated with the Classification of Likely
to Benefit or Not Likely to Benefit from Immunotherapy for Melanoma

| | | | | Glycosylation | | |
|---|---|---|---|---|---|---|
| | | Protein | Peptide | Site within | | |
| Marker (Site | Protein | SEQ | SEQ | Prot SEQ | | |
| Monomer) | Name | ID NO | ID NO | ID NO | Monomer | Coeficient |
| IC1_253_fuco | Plasma | 556 | 2677 | 253 | Fucose | −0.004472 |
| | protease C1 | | | | | |
| | inhibitor | | | | | |
| A1AT_70_fuco | Alpha-1- | 657 | 2778 | 70 | Fucose | 0.2339732 |
| | antitrypsin | | | | | |
| CFAH_882_fuco | ComplementF | 253 | 2879 | 882 | Fucose | 0.1453662 |
| | actorH | | | | | |
| HPT_184_fuco | Haptoglobin | 354 | 2980 | 184 | Fucose | 0.2917658 |
| TRFE_630_fuco | Serotransferrin | 152 | 3081 | 630 | Fucose | 0.3406138 |
| FETUA_156_fuco | Alpha-2-HS- | 455 | 3182 | 156 | Fucose | −0.237215 |
| | glycoprotein | | | | | |
| HEMO_187_fuco | Hemopexin | 758 | 3283 | 187 | Fucose | −0.463297 |
| APOH_253_fuco | Beta-2- | 2576 | 3384 | 253 | Fucose | 0.0076569 |
| | glycoprotein1 | | | | | |
| CERU_397_fuco | Ceruloplasmin | 960 | 3485 | 397 | Fucose | 0.2983246 |
| CERU_138_fuco | Ceruloplasmin | 960 | 3586 | 138 | Fucose | 0.0751997 |
| CERU_762_fuco | Ceruloplasmin | 960 | 3687109 | 762 | Fucose | −0.146133 |

TABLE 30
Performance of monomer weight model using 11 fucose-specific
features derived from N-glycopeptides that achieved FDR
< 0.05 in age- and sex-adjusted Cox regression analysis

| | | | | |
|---|---|---|---|---|
| Classifier prediction | Events/N | Median OS (95% CI) | HR (95% CI) | P-value |

Full discovery cohort (n = 202)

| Likely to benefit | 96/180 | 50.4 (36.1, 75.7) | Reference | |
|---|---|---|---|---|
| Unlikely to benefit | 17/22 | 3.7 (2.8, 12.8) | 3.1 (1.9, 5.3) | 1.6 × 10⁻⁵ |

Discovery: training set (n = 79)

| Likely to benefit | 36/70 | 54.2 (37.9, NR) | Reference | |
|---|---|---|---|---|
| Unlikely to benefit | 6/9 | 1.8 (1.2, NR) | 2.9 (1.2, 7.0) | 0.016 |

Discovery: validation set (n = 59)

| Likely to benefit | 27/53 | 54.8 (24.8, NR) | Reference | |
|---|---|---|---|---|
| Unlikely to benefit | 5/6 | 3.2 (2.9, NR) | 3.8 (1.4, 10.0) | 6.7 × 10⁻³ |

Discovery: test set (n = 64)

| Likely to benefit | 33/57 | 39.4 (17.3, NR) | Refertableence | |
|---|---|---|---|---|
| Unlikely to benefit | 6/7 | 5.1 (4.1, NR) | 3.5 (1.4, 8.5) | 6.6 × 10⁻³ |

[1124] Although ICI therapies have revolutionized treatment of metastatic melanoma, only a subset of patients achieve a durable response. Therefore, it is important to develop assays that accurately identify patients unlikely to benefit from ICI therapy. Such efforts might also provide insight into specific factors that limit the efficacy of anti-PD-1, anti-PD-L1, and anti-CTLA-4 antibodies, and might inform selection of different or combination therapies. Here, pre-treatment liquid biopsy samples were analyzed using a novel platform and signatures were identified to predict response of metastatic melanoma. The data indicated that blood glycoprotein biomarker profiles accurately predict the likelihood of a beneficial or not beneficial response in melanoma patients.

[1125] Glycosylation is the most abundant and complex form of post-translational modification of proteins and it profoundly affects their structure, conformation, and function. The elucidation of the relevance of differential protein glycosylation as a novel class of biomarkers has so far been limited by the technical challenges of generating and interpreting this information at scale. Our platform helped uncover a specific fucosylation signature in plasma N-glycoproteins that tracks with the lack of response to ICI therapy. Fucosyltransferases, the enzymes responsible for addition of fucose to glycans, are overexpressed in malignant melanoma. Presence of fucose in the N-glycan of IgG1 significantly reduces its binding to FcgR. Core fucose has been shown to increase in metastatic melanoma cells and to affect cell invasion through the modulation of the stability of the adhesin L1CAM. Fucosylation can also alter TGF-β signaling and may therefore drive immune-excluded tumor phenotypes. Moreover, fucosylation has been directly linked to the stability of receptors such as cell surface PD-1. It is interesting that a similar fucosylation signature is observed both in the tumor microenvironment and in the periphery.

[1126] The role of A1AT glycosylation in binding to IL-8 and neutrophil activation has previously been described. Moreover, our functional analysis shows association of A1AT and AACT with platelet activation and thus a likely predisposition to hypercoagulable state, a process previously described to be associated with complications of advanced melanoma. Network analysis of cancer-causing genes relates the B2M gene product to melanoma. Beta2-microglobulin is found in association with the MHC class I alpha chain and is involved in antigen presentation. Beta2-microglobulin unbalance may promote tumor escape from recognition by CD8+ T cells, and may have a role in neutrophil degranulation. LRG1 has been described to modulate the tumor microenvironment on neutrophil activation. We propose that cells at the tumor site produce factors that are released in the periphery and modulate expression and glycosylation of protein in the liver and blood cells. The complex glycoproteomic response may in turn impact disease progression and response to treatment.

[1127] When key clinical variables are stratified by the classifier prediction in the discovery cohort, a few patterns become clear. For patients with higher LDH values at treatment start, the median OS decreases, irrespective of the classification as likely or unlikely to respond to ICI therapy. In other words, while belonging to a higher LDH category is associated with increased risk of death, samples classified as likely to benefit exhibit increased median OS compared to the group categorized as unlikely to benefit, regardless of the LDH category of a patient. The same pattern is observed with respect to BRAF mutation status: while being a BRAF mutant is perhaps slightly associated with increased risk of death, being classified as likely to benefit increases median OS relative to being classified as unlikely to benefit regardless of BRAF status. Somewhat in contrast, patients who have ECOG performance status above 1 demonstrate short median overall survival regardless of classification. However, samples classified as unlikely to benefit have comparable median overall survival regardless of ECOG performance status. This phenomenon is additional evidence that the glycoproteomic classifier provides significant utility in identifying patients who are unlikely to respond to ICI therapy, regardless of other physiological characteristics.

### Section 8—Predicting Peptide Retention Time in Mass Spectrometry

### A8. Description of Systems and Methods

[1128] The methods and systems disclosed herein may be used to predict retention times for peptides in liquid chromatography mass spectrometry (LC-MS) runs. In such runs, retention time (RT) is generally a measure of the time taken for an analyte (e.g., a peptide, a glycopeptide) to pass through a liquid chromatography column. It is calculated as the time from injection to detection of the analyte. The retention time can be used to determine a likely identity of the analyte, because different analytes can be expected to pass through at different rates based on their physicochemical properties. Although general estimates for retention times of peptides may be found in literature, retention times can vary based on actual run conditions (e.g., the instruments used, gas flow rate settings, column degradation, column length and other dimensions, temperature, reagents and other materials used, lab conditions). As such, methods and systems for more accurately predicting retention times for a particular LC-MS run is needed.

[1129] In some embodiments, the methods and systems disclosed herein may also be used for quality control purposes. Variations in retention time can also be the result of carryover from a previous run. By having a means for accurately predicting retention times based on actual run conditions, a user can calculate a difference between predicted retention times and measured retention times for known analytes. If the difference is greater than an acceptable threshold, the user may determine that there is unacceptable carryover from a previous run, and may thus be able to take remedial measures (e.g., by cleaning the liquid chromatography column and/or the mass spectrometer) to prevent inaccurate results.

[1130] Described herein are machine learning methods for accurately predicting retention times for peptides. Although the details of the systems and methods described here are optimized for peptides, the disclosure contemplates that similar approaches may be taken for glycopeptides (and/or glycoproteins, glycolipids, glycoRNA, glycoDNA, etc.) with sufficient optimization.

[1131] FIG. 52 illustrates an example workflow for generating training sets for training a machine learning model for predicting retention times for peptides.

[1132] FIG. 53 illustrates the retention time distribution (n=1,783) of a particular peptide “VFDEFKPLVEEPQNLIK” from serum using the workflow illustrated in FIG. 52. The sample used to get this data before LC-MS steps was sourced from sigma serum which is a healthy human sample. This sample was then cleaved into peptides using tryptic serum digestion. The LC-model used was Thermo Ultimate 3000 and the column was a Waters HSS T3 with a size of 2.1×150 mm. The LC gradient length was 45 minutes. The mass spectrometer used was Bruker Impact II and the MS/MS acquisition was AutoMSMS CID.

[1133] FIG. 54 illustrates an example LC-MS workflow and data extraction steps that may be employed. As shown, at step 1, serum samples are transferred to a container (e.g., 96-well plate). At step 2, the samples are digested so as to cleave the proteins within the samples into small peptides. At Step 3, these samples are passed through a liquid chromatography-mass spectrometer system and the peptides within the samples are detected. At Step 4, quality control is performed.

[1134] FIG. 55 illustrates an example workflow for predicting retention times based on human serum samples as described herein. In this example workflow, the input data included approximately 1 million samples of peptide sequences with their retention times. The number of sequences was then reduced by removing all sequences with greater than 40 amino acids and also by removing outliers for each peptide sequence by removing samples with more than 1 standard deviation from the mean (to avoid too much for the same peptide). These methods brought the sample size to ˜600,000 samples which was the input to the models described herein. This input included 8200 unique peptide sequences.

[1135] In some embodiments, the input features may include, in addition to the peptide sequences, PC properties that are associated with the peptides or peptide sequences. The physicochemical properties may be identified by a correlation study. This may ensure that redundant features are not included in the input feature set. For example, a Pearson correlation may be used on the entire set of identified physicochemical properties. Retention time may be included in this analysis, to observe dependency of each feature and the retention time. Another major aspect considered was how independent each feature was from the other. Any suitable PC properties may be accounted for. In particular, correlation studies performed on the sample sequences described herein indicated that the PC properties of molecular weight, charge, aromaticity, and hydrophobicity properties are significant and may be advantageous to include in the feature set.

[1136] In some embodiments, the peptide sequences may be encoded to allow for processing on neural networks using any suitable encoding process. For example, one-hot encoding or BLOSUM 62 methods may be used to encode the peptide sequences. In one-hot, a matrix with columns of 20 amino acids with one translational stop and rows with the length of a peptide sequence may be formed. To have a uniform input, post padding with 0 may be used on this input matrix to have a 40×21 matrix. This matrix is then compressed to a vector to form the peptide sequence embedding.

[1137] In BLOSUM 62, a similar approach may be used but instead the matrix columns may be 24 columns (20 columns for unique amino acids, 3 columns for special amino acid characters, and 1 column for a translation stop). This gives us an input matrix of 40×24 which is then compressed to a vector to form the peptide sequence embedding. The encoded sequence and its identified physicochemical features are then concatenated to give us the final feature set. Moreover, retention time is set as the target variable.

[1138] Finally, the feature set and the target variable may be normalized between 0 and 1. This is done to ensure it is easy for the model to understand the data and more importantly there is no bias towards bigger values in the input set. This set is then sent as input to the model for training and validation.

[1139] FIG. 56 illustrates a number of different architectures that were attempted for creating a model for predicting peptide retention times. For training, we first started with a base model which was chosen to be 1D CNN followed by an activation, batch normalization and max-pooling layer and this was then sent to the set of Flatten and Dense layers to get our output. We used an additive layer inclusion to observe differences in results from the previous model run. Next we added 3 more 1D CNN layers after the first one in the next architecture to see the significance of depth. Next, we added a BiLSTM layer to see the contribution due to the addition of an RNN layer in the architecture. Further, we added another BiLSTM layer followed by a Self-Attention layer and another variant with the addition of a Multi-Head Attention layer. These layers were again followed by the set of Flatten and Dense layers to give us the output.

[1140] FIGS. 57A-57B illustrate plots of R2 and R2 Adjusted scores (BLOSUM and one-hot encodings) received using the various architectures noted in FIG. 56. For the base model we get the R2 and R2 Adjusted scores of approximately 92% for BLOSUM encoding. The Multi-Head Mechanism performed well for both encoding methods, achieving a R2 and R2-Adjusted value of approximately 97%. The fact that R2 and R2-Adjusted scores were close shows that the models are not overfitting. This is the network architecture labeled 4C_2B_MA in FIG. 56, which includes four 1DCNN layers, 2 BiLSTM layers, 1 Multi-Head Attention layer, and 1 Flatten+Dense layer.

[1141] FIG. 58A illustrate an example method for predicting a retention time for a peptide. FIG. 58B illustrates an example method for training a neural network configured to predict retention times of peptides.

[1142] Particular embodiments may repeat one or more steps of the method of FIGS. 58A and 58B, where appropriate. Although this disclosure describes and illustrates particular steps of the method of FIGS. 58A and 58B as occurring in a particular order, this disclosure contemplates any suitable steps of the method of FIGS. 58A and 58B occurring in any suitable order. Furthermore, the disclosure contemplates that the methods may include additional steps that are not illustrated in FIGS. 58A and 58B. For example, they may include additional steps described elsewhere in this disclosure. Moreover, although this disclosure describes and illustrates particular components, devices, or systems carrying out particular steps of the method of FIGS. 58A and 58B, this disclosure contemplates any suitable combination of any suitable components, devices, or systems carrying out any suitable steps of the method of FIGS. 58A and 58B. Moreover, this disclosure contemplates that some or all of the computing operations described herein, including certain steps of the example method illustrated in FIGS. 58A and 58B, may be performed by circuitry of a computing device described herein, by a processor coupled to non-transitory computer readable storage media, or any suitable combination thereof.

[1143] FIG. 59 illustrates an example computer system 5900. In particular embodiments, one or more computer systems 5900 perform one or more steps of one or more methods described or illustrated herein. In particular embodiments, one or more computer systems 5900 provide functionality described or illustrated herein. In particular embodiments, software running on one or more computer systems 5900 performs one or more steps of one or more methods described or illustrated herein or provides functionality described or illustrated herein. Particular embodiments include one or more portions of one or more computer systems 5900. Herein, reference to a computer system may encompass a computing device, and vice versa, where appropriate. Moreover, reference to a computer system may encompass one or more computer systems, where appropriate.

[1144] This disclosure contemplates any suitable number of computer systems 5900. This disclosure contemplates computer system 5900 taking any suitable physical form. As an example, computer system 5900 may be an embedded computer system, a system-on-chip (SOC), a single-board computer system (SBC) (such as, for example, a computer-on-module (COM) or system-on-module (SOM)), a desktop computer system, a laptop or notebook computer system, an interactive kiosk, a mainframe, a mesh of computer systems, a mobile telephone, a personal digital assistant (PDA), a server, a tablet computer system, or a combination of two or more of these. Where appropriate, computer system 5900 may include one or more computer systems 5900; be unitary or distributed; span multiple locations; span multiple machines; span multiple data centers; or reside in a cloud, which may include one or more cloud components in one or more networks. Where appropriate, one or more computer systems 5900 may perform without substantial spatial or temporal limitation one or more steps of one or more methods described or illustrated herein. As an example, one or more computer systems 5900 may perform in real time or in batch mode one or more steps of one or more methods described or illustrated herein. One or more computer systems 5900 may perform at different times or at different locations one or more steps of one or more methods described or illustrated herein, where appropriate.

[1145] In particular embodiments, computer system 5900 includes a processor 5902, memory 5904, storage 5906, an input/output (I/O) interface 5908, a communication interface 5910, and a bus 5912. Although this disclosure describes and illustrates a particular computer system having a particular number of particular components in a particular arrangement, this disclosure contemplates any suitable computer system having any suitable number of any suitable components in any suitable arrangement.

[1146] In particular embodiments, processor 5902 includes hardware for executing instructions, such as those making up a computer program. As an example, to execute instructions, processor 5902 may retrieve (or fetch) the instructions from an internal register, an internal cache, memory 5904, or storage 5906; decode and execute them; and then write one or more results to an internal register, an internal cache, memory 5904, or storage 5906. In particular embodiments, processor 5902 may include one or more internal caches for data, instructions, or addresses. This disclosure contemplates processor 5902 including any suitable number of any suitable internal caches, where appropriate. As an example, processor 5902 may include one or more instruction caches, one or more data caches, and one or more translation lookaside buffers (TLBs). Instructions in the instruction caches may be copies of instructions in memory 5904 or storage 5906, and the instruction caches may speed up retrieval of those instructions by processor 5902. Data in the data caches may be copies of data in memory 5904 or storage 5906 for instructions executing at processor 5902 to operate on; the results of previous instructions executed at processor 5902 for access by subsequent instructions executing at processor 5902 or for writing to memory 5904 or storage 5906; or other suitable data. The data caches may speed up read or write operations by processor 5902. The TLBs may speed up virtual-address translation for processor 5902. In particular embodiments, processor 5902 may include one or more internal registers for data, instructions, or addresses. This disclosure contemplates processor 5902 including any suitable number of any suitable internal registers, where appropriate. Where appropriate, processor 5902 may include one or more arithmetic logic units (ALUs); be a multi-core processor; or include one or more processors 5902. Although this disclosure describes and illustrates a particular processor, this disclosure contemplates any suitable processor.

[1147] In particular embodiments, memory 5904 includes main memory for storing instructions for processor 5902 to execute or data for processor 5902 to operate on. As an example, computer system 5900 may load instructions from storage 5906 or another source (such as, for example, another computer system 5900) to memory 5904. Processor 5902 may then load the instructions from memory 5904 to an internal register or internal cache. To execute the instructions, processor 5902 may retrieve the instructions from the internal register or internal cache and decode them. During or after execution of the instructions, processor 5902 may write one or more results (which may be intermediate or final results) to the internal register or internal cache. Processor 5902 may then write one or more of those results to memory 5904. In particular embodiments, processor 5902 executes only instructions in one or more internal registers or internal caches or in memory 5904 (as opposed to storage 5906 or elsewhere) and operates only on data in one or more internal registers or internal caches or in memory 5904 (as opposed to storage 5906 or elsewhere). One or more memory buses (which may each include an address bus and a data bus) may couple processor 5902 to memory 5904. Bus 5912 may include one or more memory buses, as described below. In particular embodiments, one or more memory management units (MMUs) reside between processor 5902 and memory 5904 and facilitate accesses to memory 5904 requested by processor 5902. In particular embodiments, memory 5904 includes random access memory (RAM). This RAM may be volatile memory, where appropriate Where appropriate, this RAM may be dynamic RAM (DRAM) or static RAM (SRAM). Moreover, where appropriate, this RAM may be single-ported or multi-ported RAM. This disclosure contemplates any suitable RAM. Memory 5904 may include one or more memories 5904, where appropriate. Although this disclosure describes and illustrates particular memory, this disclosure contemplates any suitable memory.

[1148] In particular embodiments, storage 5906 includes mass storage for data or instructions. As an example, storage 5906 may include a hard disk drive (HDD), a floppy disk drive, flash memory, an optical disc, a magneto-optical disc, magnetic tape, or a Universal Serial Bus (USB) drive or a combination of two or more of these. Storage 5906 may include removable or non-removable (or fixed) media, where appropriate. Storage 5906 may be internal or external to computer system 5900, where appropriate. In particular embodiments, storage 5906 is non-volatile, solid-state memory. In particular embodiments, storage 5906 includes read-only memory (ROM). Where appropriate, this ROM may be mask-programmed ROM, programmable ROM (PROM), erasable PROM (EPROM), electrically erasable PROM (EEPROM), electrically alterable ROM (EAROM), or flash memory or a combination of two or more of these. This disclosure contemplates mass storage 5906 taking any suitable physical form. Storage 5906 may include one or more storage control units facilitating communication between processor 5902 and storage 5906, where appropriate. Where appropriate, storage 5906 may include one or more storages 5906. Although this disclosure describes and illustrates particular storage, this disclosure contemplates any suitable storage.

[1149] In particular embodiments, I/O interface 5908 includes hardware, software, or both, providing one or more interfaces for communication between computer system 5900 and one or more I/O devices. Computer system 5900 may include one or more of these I/O devices, where appropriate. One or more of these I/O devices may enable communication between a person and computer system 5900. As an example, an I/O device may include a keyboard, keypad, microphone, monitor, mouse, printer, scanner, speaker, still camera, stylus, tablet, touch screen, trackball, video camera, another suitable I/O device or a combination of two or more of these. An I/O device may include one or more sensors. This disclosure contemplates any suitable I/O devices and any suitable I/O interfaces 5908 for them. Where appropriate, I/O interface 5908 may include one or more device or software drivers enabling processor 5902 to drive one or more of these I/O devices. I/O interface 5908 may include one or more I/O interfaces 5908, where appropriate. Although this disclosure describes and illustrates a particular I/O interface, this disclosure contemplates any suitable I/O interface.

[1150] In particular embodiments, communication interface 5910 includes hardware, software, or both providing one or more interfaces for communication (such as, for example, packet-based communication) between computer system 5900 and one or more other computer systems 5900 or one or more networks. As an example, communication interface 5910 may include a network interface controller (NIC) or network adapter for communicating with an Ethernet or other wire-based network or a wireless NIC (WNIC) or wireless adapter for communicating with a wireless network, such as a WI-FI network. This disclosure contemplates any suitable network and any suitable communication interface 5910 for it. As an example, computer system 5900 may communicate with an ad hoc network, a personal area network (PAN), a local area network (LAN), a wide area network (WAN), a metropolitan area network (MAN), or one or more portions of the Internet or a combination of two or more of these. One or more portions of one or more of these networks may be wired or wireless. As an example, computer system 5900 may communicate with a wireless PAN (WPAN) (such as, for example, a BLUETOOTH WPAN), a WI-FI network, a WI-MAX network, a cellular telephone network (such as, for example, a Global System for Mobile Communications (GSM) network), or other suitable wireless network or a combination of two or more of these. Computer system 5900 may include any suitable communication interface 5910 for any of these networks, where appropriate. Communication interface 5910 may include one or more communication interfaces 5910, where appropriate. Although this disclosure describes and illustrates a particular communication interface, this disclosure contemplates any suitable communication interface.

[1151] In particular embodiments, bus 5912 includes hardware, software, or both coupling components of computer system 5900 to each other. As an example, bus 5912 may include an Accelerated Graphics Port (AGP) or other graphics bus, an Enhanced Industry Standard Architecture (EISA) bus, a front-side bus (FSB), a HYPERTRANSPORT (HT) interconnect, an Industry Standard Architecture (ISA) bus, an INFINIBAND interconnect, a low-pin-count (LPC) bus, a memory bus, a Micro Channel Architecture (MCA) bus, a Peripheral Component Interconnect (PCI) bus, a PCI-Express (PCIe) bus, a serial advanced technology attachment (SATA) bus, a Video Electronics Standards Association local (VLB) bus, or another suitable bus or a combination of two or more of these. Bus 5912 may include one or more buses 5912, where appropriate. Although this disclosure describes and illustrates a particular bus, this disclosure contemplates any suitable bus or interconnect.

[1152] Herein, a computer-readable non-transitory storage medium or media may include one or more semiconductor-based or other integrated circuits (ICs) (such, as for example, field-programmable gate arrays (FPGAs) or application-specific ICs (ASICs)), hard disk drives (HDDs), hybrid hard drives (HHDs), optical discs, optical disc drives (ODDs), magneto-optical discs, magneto-optical drives, floppy diskettes, floppy disk drives (FDDs), magnetic tapes, solid-state drives (SSDs), RAM-drives, SECURE DIGITAL cards or drives, any other suitable computer-readable non-transitory storage media, or any suitable combination of two or more of these, where appropriate. A computer-readable non-transitory storage medium may be volatile, non-volatile, or a combination of volatile and non-volatile, where appropriate.

[1153] The description herein is provided to enable one of ordinary skill in the art to make and use the invention and to incorporate it in the context of particular applications. Various modifications, as well as a variety of uses in different applications will be readily apparent to those skilled in the art, and the general principles defined herein may be applied to a wide range of embodiments. Thus, the inventions herein are not intended to be limited to the embodiments presented, but are to be accorded their widest scope consistent with the principles and novel features disclosed herein.

[1154] All the features disclosed in this specification, (including any accompanying claims, abstract, and drawings) may be replaced by alternative features serving the same, equivalent or similar purpose, unless expressly stated otherwise. Thus, unless expressly stated otherwise, each feature disclosed is one example only of a generic series of equivalent or similar features.

### Additional Embodiments

[1155] The systems and methods of the present disclosure are further provided in the following non-limiting embodiments. In some embodiments, present systems and methods facilitate curation of a consensus list of identified glycomolecules from a plurality of glycomolecule search engines. In some embodiments, a system is a medical diagnostic or life sciences research method to identify the glycomolecule in a sample. In some embodiments, the method includes 5, 10, 15, 20, 25, 30, 40, 50 or more steps, or a number of steps in a range defined by any two of the preceding numbers. In some embodiments, at least 2, 3, 4, 5, 6, 7, 8, 9, 10, 15, 20, 25, 30, 40, 50 or more steps, or a number of steps in a range defined by any two of the preceding numbers, of the method are designed to be performed in sequence. In some embodiments, at least 2, 3, 4, 5, 6, 7, 8, 9, 10, 15, 20, 25, 30, 40, 50 or more steps, or a number of steps in a range defined by any two of the preceding numbers, of the method are designed to be performed in parallel.

[1156] In some embodiments, a system of the present disclosure is configured to provide notifications to the user of particular tasks that are time consuming or tasks that may create bottlenecks. In some embodiments, a system of the present disclosure is configured to suggest alternative tasks, or suggest abandoning a particular step. In some embodiments, a method of the present disclosure includes providing notifications to the user of particular tasks that are time consuming or tasks that may create bottlenecks. In some embodiments, a method of the present disclosure includes suggesting alternative tasks, or abandoning a particular step.

[1157] In any system or method of the present disclosure, in some embodiments, machine learning may be used for the predictions/notifications.

### Additional System Embodiments

[1158] In some embodiments, any of the systems of the present disclosure may be implemented in a cloud computing environment or cloud-based network. User interaction with the databases may be mediated via a central hub that stores and controls access to various interactions with the data. In some embodiments, the cloud computing environment may also provide sharing of protocols, analysis methods, libraries, as well as distributed processing for performing the analysis, and generating output reports. In some embodiments, the system may be implemented in a computer browser, on-demand or on-line.

[1159] In some embodiments, instructions or software written to perform the systems or methods as described herein is stored in some form of computer readable medium, such as memory (e.g., non-transitory memory), CD-ROM, DVD-ROM, memory stick, flash drive, hard drive, SSD hard drive, server, mainframe storage system and the like.

[1160] In some embodiments, systems and methods may be written in any of various suitable programming languages, for example compiled languages such as C, C#, C++, Fortran, and Java. Other programming languages could be script languages, such as Perl, MatLab, SAS, SPSS, Python, Ruby, Pascal, Delphi, R and PHP. In some embodiments, the system or method is written in C, C#, C++, Fortran, Java, Perl, R, or Python. In some embodiments, the system may include an independent application with data input and data display modules. Alternatively, the system may include a computer software product and may include classes wherein distributed objects comprise applications including computational methods as described herein.

[1161] An assay instrument, desktop computer, laptop computer, or server which may contain a processor in operational communication with accessible memory may comprise the instructions for implementation of the systems and/or methods of the present disclosure. In some embodiments, a desktop computer or a laptop computer is in operational communication with one or more computer readable storage media or devices and/or outputting devices. An assay instrument, desktop computer and a laptop computer may operate under a number of different computer-based operational languages, such as those utilized by Apple® based computer systems or PC based computer systems. An assay instrument, desktop and/or laptop computers and/or server system may further provide a computer interface for creating or modifying experimental definitions and/or conditions, viewing data results and monitoring experimental progress. In some embodiments, an outputting device may be a graphic user interface such as a computer monitor or a computer screen, a printer, a hand-held device such as a personal digital assistant (i.e., PDA, Blackberry, iPhone), a tablet computer (e.g., iPAD®), a hard drive, a server, a memory stick, a flash drive and the like.

[1162] A computer readable storage device or medium may be any device such as a server, a mainframe, a supercomputer, a magnetic tape system, and the like. In some embodiments, a storage device may be located onsite in a location proximate to the assay instrument, for example adjacent to or in close proximity to, an assay instrument. For example, a storage device may be located in the same room, in the same building, in an adjacent building, on the same floor in a building, on different floors in a building, etc., in relation to the assay instrument. In some embodiments, a storage device may be located off-site, or distal, to the assay instrument. For example, a storage device may be located in a different part of a city, in a different city, in a different state, in a different country, etc., relative to the assay instrument. In embodiments where a storage device is located distal to the assay instrument, communication between the assay instrument and one or more of a desktop, laptop, or server is typically via Internet connection, either wireless or by a network cable through an access point. In some embodiments, a storage device may be maintained and managed by the individual or entity directly associated with an assay instrument, whereas in other embodiments a storage device may be maintained and managed by a third party, typically at a distal location to the individual or entity associated with an assay instrument. In embodiments as described herein, an outputting device may be any device for visualizing data.

[1163] An assay instrument, desktop, laptop, and/or server system may be used itself to store and/or retrieve computer implemented software programs incorporating computer code for performing and implementing computational methods as described herein, data for use in the implementation of the computational methods, and the like. One or more of an assay instrument, desktop, laptop, and/or server may comprise one or more computer readable storage media for storing and/or retrieving software programs incorporating computer code for performing and implementing computational methods as described herein, data for use in the implementation of the computational methods, and the like. Computer readable storage media may include, but is not limited to, one or more of a hard drive, a SSD hard drive, a CD-ROM drive, a DVD-ROM drive, a floppy disk, a tape, a flash memory stick or card, and the like. Further, a network including the Internet may be the computer readable storage media. In some embodiments, computer readable storage media refers to computational resource storage accessible by a computer network via the Internet or a company network offered by a service provider rather than, for example, from a local desktop or laptop computer at a distal location to the assay instrument.

[1164] In some embodiments, computer readable storage media for storing and/or retrieving computer implemented software programs incorporating computer code for performing and implementing methods, e.g., computational methods, as described herein, data for use in the implementation of the methods, e.g., computational methods, and the like, is operated and maintained by a service provider in operational communication with an assay instrument, desktop, laptop and/or server system via an Internet connection or network connection.

[1165] In some embodiments, a hardware platform for providing a computational environment comprises a processor (i.e., CPU) wherein processor time and memory layout such as random access memory (i.e., RAM) are systems considerations. For example, smaller computer systems offer inexpensive, fast processors and large memory and storage capabilities. In some embodiments, graphics processing units (GPUs) can be used. In some embodiments, hardware platforms for performing computational methods as described herein comprise one or more computer systems with one or more processors. In some embodiments, smaller computers are clustered together to yield a supercomputer network.

[1166] In some embodiments, methods, e.g., computational methods, as described herein are carried out on a collection of inter- or intra-connected computer systems (i.e., grid technology) which may run a variety of operating systems in a coordinated manner. For example, the CONDOR framework (University of Wisconsin-Madison) and systems available through United Devices are exemplary of the coordination of multiple stand-alone computer systems for the purpose dealing with large amounts of data. These systems may offer Perl interfaces to submit, monitor and manage large sequence analysis jobs on a cluster in serial or parallel configurations.

### Examples

[1167] The invention will be more fully understood by reference to the following examples. They should not, however, be construed as limiting the scope of the invention. It is understood that the examples and embodiments described herein are for illustrative purposes only and that various modifications or changes in light thereof will be suggested to persons skilled in the art and are to be included within the spirit and purview of this application and scope of the appended claims.

### Example 1—Proteolytic Digestion and SDS PAGE Gel Electrophoresis

[1168] This example describes a method for improved proteolytic processing of a biological sample comprising a glycoprotein in preparation for mass spectrometry (MS) analysis, including but not limited to a targeted glycoproteomic analysis. Specifically, the method demonstrated herein comprises thermal denaturation in a thermocycler, and is compared to other conventional approaches. Poorly digested proteins (such as those resulting in missed cleavages) can lead to both system-based issues, such as clogged or partially clogged components, and analytic issues leading to poor signal, poor reproducibility, and poor quantification.

[1169] In the first step described for the method herein, ammonium bicarbonate (50 mM) and dithiothreitol (DTT) (50 mM) solutions were freshly prepared. The ammonium bicarbonate solution was used to make the DTT solution. Pre-thawed biological samples and controls were inspected for turbidity, hemolysis, clotting, and precipitation. Immediately prior to transfer, each biological sample and control was gently vortexed for 10 seconds. Using a single channel pipette, 5 μL of biological sample or control (e.g., plasma or serum) was transferred into a deep-well digestion plate, wherein the plate is compatible with thermal cycling. To this, the 35 μL of 50 mM ammonium bicarbonate solution was added. The plates were then sealed with a foil heat seal using a plate sealer. To ensure all samples were mixed thoroughly, the plates were vortexed at 1400 RPM for 1 minute on a microplate mixer, followed by centrifugation at 370×g for 1 minute.

[1170] A separate sample plate was incubated in a thermal cycler for 5 minutes, wherein the thermal cycler was set to 100° C. with a lid temperature of 105° C. All heated plates were allowed to cool to room temperature before removing from the respective heat source and spinning at 370×g for 1 minute. After the spin, the plate seals were removed.

[1171] After protein denaturation, all samples were reduced by adding 20 μL of the 50 mM DTT solution into each sample and control well. The plates were then sealed with a foil heat seal using a plate sealer. To ensure all samples were mixed thoroughly, the plates were vortexed at 1400 RPM for 1 minute on a microplate mixer, followed by centrifugation at 370×g for 1 minute. Plates were then incubated in a 60° C. water bath for 50 minutes. Plates were then removed from the water bath and centrifuged at 4,800×g for 1 minute before removing the plate seals.

[1172] Prior to the completion of this reduction incubation, a fresh 90 mM iodoacetamide (IAA) solution was prepared, and the container with the IAA solution was covered in foil. When ready, samples were alkylated by adding 20 μL of the 90 mM IAA solution into each sample and control well. The plates were then sealed with a foil heat seal using a plate sealer. To ensure all samples were mixed thoroughly, the plates were vortexed at 1400 RPM for 1 minute on a microplate mixer, followed by centrifugation at 370×g for 1 minute. Plates were then incubated in the dark at room temperature for 30 minutes. After the incubation, plate seals were removed and 10 μL of the 50 mM DTT solution was added to quench any remaining IAA in solution. The plates were then sealed with a foil heat seal using a plate sealer and vortexed at 1400 RPM for 1 minute on a microplate mixer. Plates were centrifuged at 370×g for 1 minute and the plate seals were removed.

[1173] Prior to the completion of this alkylation incubation, fresh protease solutions were prepared (trypsin or trypsin/LysC combination). For example, for the trypsin solution, trypsin powder is dissolved in the 50 mM ammonium bicarbonate solution for a final concentration of 0.167 μg/μL trypsin solution. To the quenched biological samples and controls, 60 μL of the 0.167 μg/μL trypsin solution was added to each well. The plates were then sealed with a foil heat seal using a plate sealer. To ensure all samples were mixed thoroughly, the plates were vortexed at 1400 RPM for 1 minute on a microplate mixer, followed by centrifugation at 370×g for 1 minute. Plates were then incubated in a 37° C. water bath for 18 hours. Plates were then removed from the water bath and centrifuged at 4,800×g for 1 minute before removing the plate seals.

[1174] 20 μL of freshly prepared 9% formic acid solution was added to each well containing the proteolytic digested samples to stop the enzyme reaction. The plates were then sealed with a foil heat seal using a plate sealer. To ensure all samples were mixed thoroughly, the plates were vortexed at 1400 RPM for 1 minute on a microplate mixer, followed by centrifugation at 370×g for 1 minute.

[1175] To compare the digestion efficiency based on the protein denaturation used during the sample preparation process, a relative concentration for each of the various peptide digests was used for performance of a SDS-PAGE gel analysis. Using the determined sample concentration, 20 μg of protein from each sample was transferred to a new tube and mixed with a gel loading dye and buffer (Laemmli sample buffer). Each sample was loaded onto a gel and run for 60 minutes at 150 V. Sample gels were stained in Coomassie stain and rinsed before imaging. As shown in FIG. 5A, thermal denaturation of serum at a 1:20 enzyme:sample weight ratio (denoted as the gel column Serum, TD, trypsin 1:20) significantly improved digestion efficiency of the biological sample, as determined by the decreased abundance of higher molecular weight species between 50 and 100 kDa compared to other conditions where the sample was not digested with enzyme (denoted as the gel column Serum, undigested), the sample was proteolytically digested as described above except that there was no thermal denaturation step (denoted as the gel column Serum, no TD, trypsin 1:20). For reference, the gel column denoted as Marker represents calibration standards that have a range of known molecular weight values. The gel column denoted as Serum, TD, trypsin 1:40 showed comparable digestion efficiency to the Serum, TD, trypsin 1:20, which suggests that the conditions of thermal denaturation of serum at 100° C. and trypsin to protein ratios ranging from 1:20 to 1:40 showed relatively high digestion efficiency. The gel column denoted as Serum, TD, trypsin+LysC 1:40 showed comparable digestion efficiency to the Serum, TD, trypsin 1:40, which suggests that the conditions of thermal denaturation of serum at 100° C. and either trypsin 1:40 or trypsin+LysC 1:40 both showed relatively similar and a high digestion efficiency.

[1176] As shown in FIG. 2B, thermal denaturation of plasma at a 1:40 enzyme:sample weight ratio each for both trypsin and LysC (denoted as the gel column Plasma, TD, trypsin+LysC 1:40 each) significantly improved digestion efficiency of the biological sample, as determined by the decreased abundance of higher molecular weight species between 50 and 100 kDa compared to other conditions where the sample was not digested with enzyme (denoted as the gel column Plasma, undigested), the sample was proteolytically digested as described above except that there was no thermal denaturation step (denoted as the gel column Plasma, no TD, trypsin 1:20). For reference, the gel column denoted as Marker represents calibration standards that have a range of known molecular weight values. The gel column denoted as Plasma, TD, trypsin 1:40 showed comparable, but slightly better digestion efficiency to the Plasma, TD, trypsin 1:20, which suggests that the conditions of thermal denaturation of plasma at 100 C and trypsin to protein ratios ranging from 1:20 to 1:40 showed relatively similar digestion efficiency. The gel column denoted as “Plasma, TD, trypsin+LysC 1:40 each” showed comparable digestion efficiency to the Plasma, TD, trypsin 1:40, which suggests that the conditions of thermal denaturation of serum at 100 C and either trypsin 1:40 or trypsin+LysC 1:40 both showed relatively similar and a high digestion efficiency.

### Example 2—Mass Spectrometry of Proteolytic Digests with and without a C18 Clean-Up Step

[1177] This example demonstrates a method for mass spectrometry analysis using a liquid chromatography diversion technique to remove unwanted reagents from a sample containing proteolytic glycopeptides without the need for performing separate desalting steps.

[1178] Once samples were spun, they were either subjected to a clean-up using C18 cartridges on a liquid-handling system and then injected into an LC-MS system, or directly introduced into an LC-MS system using an LC diversion technique. For the C18 clean-up, the sample was diluted with sample buffer so that the sample had a concentration of 0.5% trifluoroacetic acid (TFA). Next, the sample diluted with sample buffer was flowed through a C18 cartridge (AssayMap C18 cartridge, 5 μL, from Agilent). The C18 cartridge was washed with a wash buffer containing 0.5% TFA to remove salt from the sample. An elution buffer of 0.1% TFA and 80% ACN was used to elute the sample from the C18 cartridge and then the sample was dried to remove the elution buffer. The dried sample was reconstituted in a solution of 0.1% formic acid in water before injecting into a LC-MS system.

[1179] All samples were subjected to the same instrument method, wherein 0-3 minutes were diverted to waste, 3-47.8 minutes were passed to the MS instrument, and 47.8-49 minutes were again diverted to waste. During this time course, a constant solvent gradient was completed. The aqueous mobile phase A was 0.1% formic acid in water (vol:vol), and the organic mobile phase B was 0.1% formic acid in acetonitrile (vol:vol). Separation of peptides and glycopeptides was performed using a binary gradient of 0.0-9.0 min, 1-10% B; 9.0-36.0 min, 10-25% B; 36.0-48.0 min, 25-44% B; 48.0-48.1 min, 44-1% B; 48.1-49.0 min, 1% B. The liquid chromatography system was an Agilent 1290 Infinity II UHPLC system that used a 20 μL loop volume, 4 μL injection volume, Waters ACQUITY UPLC Peptide HSS T3 Column, 100 Å port volume, 1.8 μm particle size, 2.1 mm×150 mm (diameter×length) with HSS T3 guard column, 2.1 mm×5 mm. The output of the chromatography column was either outputted to a waste channel or to the mass spectrometer via an electrospray ionization unit using a microprocessor controlled valve depending on the time of the chromatography run (see Table 1).

TABLE 1
Chromatography control parameters.

| Time | Scan Type | Divert vale |
|---|---|---|
| 0-3 minutes | dMRM | To waste |
| 3-47.8 minutes | dMRM | To MS |
| 47.8-49 minutes | dMRM | To waste |

[1180] FIG. 3A shows a valve position 1 where the chromatography column output goes to waste via ports 2 and 3 of the diverter valve and FIG. 3B shows a valve position 2 where the chromatography output goes to waste via ports 2 and 3 of the diverter valve. The mass spectrometry system was an Agilent 6495C triple quadrupole mass spectrometer. Samples were introduced into the mass spectrometer using an electrospray ionization (ESI) source operated in the positive ion mode. Nitrogen drying and sheath gas temperatures were set at 290° C. and 300° C., respectively. Drying and sheath gas flow rates were set at 11 L/min and 12 L/min, respectively. The nebulizer pressure was set to 30 psi. Data acquired from the UHPLC/QqQ-MS was collected using Agilent MassHunter Workstation LC/MS Data Acquisition B10.1.67. Sample analysis was performed using a dynamic multiple reaction monitoring (dMRM) method. Collision induced dissociation was used for fragmentation.

[1181] Results of the peptide fragment quantification were obtained with proteolytic digests that did not use a conventional C18 clean up step and instead used a post chromatography column valve with a salt diversion step and also with a more conventional approach where the proteolytic digest was de-salted with a C18 sample phase extraction material. Omission of the C18 clean-up step significantly enhanced the peptide fragment signal for multiple targets, as illustrated by FIG. 4 for two particular glycopeptides. During HPLC measurements using the conditions of this example, the glycopeptides A1AT_107_6513 and A2MG_1424_5402 had a relatively long retention time of 43 minutes and 44 minutes respectively indicating that both glycopeptides had a relatively high hydrophobicity. Details pertaining to A1AT_107_6513 and A2MG_1424_5402 are provided in Tables 2-4. Importantly, this signal enhancement was observed from both particularly substantially glycopeptides as well as substantially hydrophobic glycopeptides, indicating that standard C18 chromatography results in loss of glycopeptides on both ends of the hydrophobicity spectrum. It is worthwhile to note that although A1AT_107_6513 has 3 sialic acid groups and A2MG_1424_5402 has 2 sialic acid groups, these two glycopeptides are believed to have a long and hydrophobic peptide backbone. Both A1AT_107_6513 and A2MG_1424_5402 appeared to strongly bind to the C18 sample phase extraction material such that a significant portion of these glycopeptides were not eluted off the C18 sample phase extraction material and thus not measured in the mass spectrometric analysis. FIG. 4 illustrates that the MS signal measured with the diverter valve and without using the C18 sample phase extraction material provided a higher peak area for both A1AT_107_6513 and A2MG_1424_5402 providing an improved method of measuring hydrophobic glycopeptides without using a C18 sample phase extraction material.

[1182] The false discovery rate (FDR) was also assessed for glycopeptides identified using these two approaches (with and without C18 clean-up). Omission of the C18 clean-up step (labeled as “preC18”) significantly reduced the FDR in differentiating cases versus controls for all of targets (FIG. 5), suggesting omission of the clean-up step, and instead performing a diversion step, would be beneficial for identifying glycopeptides. It is possible that the omission of the C18 clean-up step and the use of the diversion step reduced the variance of the measured signal and/or increased the overall magnitude of the measured signal for the various transitions. Details pertaining to glycopeptides in FIG. 5 are provided in Tables 2-4.

TABLE 2
Glycoprotein information and sequences.

| SEQ | | | | |
|---|---|---|---|---|
| ID | Protein | | Uniprot | |
| NO | Abbreviation | Protein Name | ID | Protein Sequence |
| SEQ | A1AT | Alpha-1- | P01009 | MPSSVSWGILLLAGLCCLVPVSLAEDPQG |
| ID | | antitrypsin | | DAAQKTDTSHHDQDHPTFNKITPNLAEFA |
| NO: | | | | FSLYRQLAHQSNSTNIFFSPVSIATAFAMLS |
| 1 | | | | LGTKADTHDEILEGLNFNLTEIPEAQIHEGF |
| | | | | QELLRTLNQPDSQLQLTTGNGLFLSEGLKL |
| | | | | VDKFLEDVKKLYHSEAFTVNFGDTEEAKK |
| | | | | QINDYVEKGTQGKIVDLVKELDRDTVFAL |
| | | | | VNYIFFKGKWERPFEVKDTEEEDFHVDQV |
| | | | | TTV |
| | | | | KVPMMKRLGMFNIQHCKKLSSWVLLMKY |
| | | | | LGNATAIFFLPDEGKLQHLENELTHDIITKF |
| | | | | LENEDRRSASLHLPKLSITGTYDLKSVLGQ |
| | | | | LGITKVFSNGADLSGVTEEAPLKLSKAVH |
| | | | | KAVLTIDEKGTEAAGAMFLEAIPMSIPPEV |
| | | | | KFNKPFVFLMIEQNTKSPLFMGKVVNPTQ |
| | | | | K |
| SEQ | A2MG | Alpha-2- | P01023 | MGKNKLLHPSLVLLLLVLLPTDASVSGKP |
| ID | | macroglobulin | | QYMVLVPSLLHTETTEKGCVLLSYLNETV |
| NO: | | | | TVSASLESVRGNRSLFTDLEAENDVLHCV |
| 2 | | | | AFAVPKSSSNEEVMFLTVQVKGPTQEFKK |
| | | | | RTTVMVKNEDSLVFVQTDKSIYKPGQTVK |
| | | | | FRVVSMDENFHPLNELIPLVYIQDPKGNRI |
| | | | | AQWQSFQLEGGLKQFSFPLSSEPFQGSYKV |
| | | | | VVQKKSGGRTEHPFTVEEFVLPKFEVQVT |
| | | | | VPKIITILEEEMNVSVCGLYTYGKPVPGHV |
| | | | | TVSICRKYSDASDCHGEDSQAFCEKFSGQL |
| | | | | NSHGCFYQQVKTKVFQLKRKEYEMKLHT |
| | | | | EAQIQEEGTVVELTGRQSSEITRTITKLSFV |
| | | | | KVDSHFRQGIPFFGQVRLVDGKGVPIPNKV |
| | | | | IFIRGNEANYYSNATTDEHGLVQFSINTTN |
| | | | | VMGTSLTVRVNYKDRSPCYGYQWVSEEH |
| | | | | EEAHHTAYLVFSPSKSFVHLEPMSHELPCG |
| | | | | HTQTVQAHYILNGGTLLGLKKLSFYYLIM |
| | | | | AKGGIVRTGTHGLLVKQEDMKGHFSISIPV |
| | | | | KSDIAPVARLLIYAVLPTGDVIGDSAKYDV |
| | | | | ENCLANKVDLSFSPSQSLPASHAHLRVTA |
| | | | | APQSVCALRAVDQSVLLMKPDAELSASSV |
| | | | | YNLLPEKDLTGFPGPLNDQDNEDCINRHN |
| | | | | VYINGITYTPVSSTNEKDMYSFLEDMGLK |
| | | | | AFTNSKIRKPKMCPQLQQYEMHGPEGLRV |
| | | | | GFYESDVMGRGHARLVHVEEPHTETVRK |
| | | | | YFPETWIWDLVVVNSAGVAEVGVTVPDTI |
| | | | | TEWKAGAFCLSEDAGLGISSTASLRAFQPF |
| | | | | FVELTMPYSVIRGEAFTLKATVLNYLPKCI |
| | | | | RVSVQLEASPAFLAVPVEKEQAPHCICAN |
| | | | | GRQTVSWAVTPKSLGNVNFTVSAEALESQ |
| | | | | ELCGTEVPSVPEHGRKDTVIKPLLVEPEGL |
| | | | | EKETTFNSLLCPSGGEVSEELSLKLPPNVV |
| | | | | EESARASVSVLGDILGSAMQNTQNLLQMP |
| | | | | YGCGEQNMVLFAPNIYVLDYLNETQQLTP |
| | | | | EIKSKAIGYLNTGYQRQLNYKHYDGSYST |
| | | | | FGERYGRNQGNTWLTAFVLKTFAQARAYI |
| | | | | FIDEAHITQALIWLSQRQKDNGCFRSSGSL |
| | | | | LNNAIKGGVEDEVTLSAYITIALLEIPLTVT |
| | | | | HPVVRNALFCLESAWKTAQEGDHGSHVY |
| | | | | TKALLAYAFALAGNQDKRKEVLKSLNEE |
| | | | | AVKKDNSVHWERPQKPKAPVGHFYEPQA |
| | | | | PSAEVEMTSYVLLAYLTAQPAPTSEDLTSA |
| | | | | TNIVKWITKQQNAQGGFSSTQDTVVALHA |
| | | | | LSKYGAATFTRTGKAAQVTIQSSGTFSSKF |
| | | | | QVDNNNRLLLQQVSLPELPGEYSMKVTGE |
| | | | | GCVYLQTSLKYNILPEKEEFPFALGVQTLP |
| | | | | QTCDEPKAHTSFQISLSVSYTGSRSASNMA |
| | | | | IVDVKMVSGFIPLKPTVKMLERSNHVSRTE |
| | | | | VSSNHVLIYLDKVSNQTLSLFFTVLQDVPV |
| | | | | RDLKPAIVKVYDYYETDEFAIAEYNAPCS |
| | | | | KDLGNA |
| SEQ | AGP1 | Alpha-1-acid | P02763 | MALSWVLTVLSLLPLLEAQIPLCAN |
| ID | | glycoprotein 1 | | LVPVPITNATLDQITGKWFYIASAF |
| NO: | | | | RNEEYNKSVQEIQATFFYFTPNKTE |
| 3 | | | | DTIFLREYQTRQDQCIYNTTYLNVQ |
| | | | | RENGTISRYVGGQEHFAHLLILRDT |
| | | | | KTYMLAFDVNDEKNWGLSVYADK |
| | | | | PETTKEQLGEFYEALDCLRIPKSDV |
| | | | | VYTDWKKDKCEPLEKQHEKERKQ |
| | | | | EEGES |
| SEQ | HEMO | Hemopexin | P02790 | MARVLGAPVALGLWSLCWSLAIATPLPPT |
| ID | | | | SAHGNVAEGETKPDPDVTERCSDGWSFDA |
| NO: | | | | TT |
| 4 | | | | LDDNGTMLFFKGEFVWKSHKWDRELISER |
| | | | | WKNFPSPVDAAFRQGHNSVFLIKGDKVW |
| | | | | VYP |
| | | | | PEKKEKGYPKLLQDEFPGIPSPLDAAVECH |
| | | | | RGECQAEGVLFFQGDREWFWDLATGTMK |
| | | | | ER |
| | | | | SWPAVGNCSSALRWLGRYYCFQGNQFLR |
| | | | | FDPVRGEVPPRYPRDVRDYFMPCPGRGHG |
| | | | | HRN |
| | | | | GTGHGNSTHHGPEYMRCSPHLVLSALTSD |
| | | | | NHGATYAFSGTHYWRLDTSRDGWHSWPI |
| | | | | AHQ |
| | | | | WPQGPSAVDAAFSWEEKLYLVQGTQVYV |
| | | | | FLTKGGYTLVSGYPKRLEKEVGTPHGIILD |
| | | | | SV |
| | | | | DAAFICPGSSRLHIMAGRRLWWLDLKSGA |
| | | | | QATWTELPWPHEKVDGALCMEKSLGPNS |
| | | | | CSA |
| | | | | NGPGLYLIHGPNLYCYSDVEKLNAAKALP |
| | | | | QPQNVTSLLGCTH |
| SEQ | HPT | Haptoglobin | P00738 | MSALGAVIALLLWGQLFAVDSGN |
| ID | | | | DVTDIADDGCPKPPEIAHGYVEHSV |
| NO: | | | | RYQCKNYYKLRT |
| 5 | | | | EGDGVYTLNDKKQWINKAVGDKL |
| | | | | PECEADDGCPKPPEIAHGYVEHSVR |
| | | | | YQCKNYYKLRTE |
| | | | | GDGVYTLNNEKQWINKAVGDKLP |
| | | | | ECEAVCGKPKNPANPVQRILGGHL |
| | | | | DAKGSFPWQAKMV |
| | | | | SHHNLTTGATLINEQWLLTTAKNL |
| | | | | FLNHSENATAKDIAPTLTLYVGKK |
| | | | | QLVEIEKVVLHP |
| | | | | NYSQVDIGLIKLKQKVSVNERVMPI |
| | | | | CLPSKDYAEVGRVGYVSGWGRNA |
| | | | | NFKFTDHLKYVM |
| | | | | LPVADQDQCIRHYEGSTVPEKKTP |
| | | | | KSPVGVQPILNEHTFCAGMSKYQE |
| | | | | DTCYGDAGSAFA |
| | | | | VHDLEEDTWYATGILSFDKSCAVA |
| | | | | EYGVYVKVTSIQDWVQKTIAEN |

TABLE 3
Structures associated with FIGS. 4 and 5.

| | | | Linking | Linking | |
|---|---|---|---|---|---|
| | | | Site Pos. | Site Pos. | |
| SEQ | Peptide Structure (PS) | | in Protein | in Peptide | Glycan |
| ID NO | NAME | Peptide Sequence | Sequence | Sequence | Structure |
| SEQ ID | A1AT_70_5412 | QLAHQSNSTNI | 70 | 7 | 5412 |
| NO: 6 | | FFSPVSIATAFA | | | |
| | | MLSLGTK | | | |
| SEQ ID | AGP1_103_7603 | ENGTISR | 103 | 2 | 7603 |
| NO: 7 | | | | | |
| SEQ ID | HEMO_187_5412 | SWPAVGNCSS | 187 | 7 | 5412 |
| NO: 8 | | ALR | | | |
| SEQ ID | HPT_184_5412 | MVSHHNLTTG | 184 | 6 | 5412 |
| NO: 9 | | ATLINEQWLLT | | | |
| | | TAK | | | |
| SEQ ID | HPT_207_10803 | NLFLNHSENAT | 207 & 211 | 5 & 9 | 5401 & |
| NO: 10 | | AK | | | 5402 |
| SEQ ID | HPT_207_11904 | NLFLNHSENAT | 207 & 211 | 5 & 9 | 5402 & |
| NO: 11 | | AK | | | 6502 |
| SEQ ID | HPT_207_121015 | NLFLNHSENAT | 207 & 211 | 5 & 9 | 6502 & |
| NO: 12 | | AK | | | 6513 |
| SEQ ID | HPT_241_5412 | VVLHPNYSQV | 241 | 6 | 5412 |
| NO: 13 | | DIGLIK | | | |

TABLE 4
Glycan structures associated with FIGS. 4 and 5.

| Glycan Structure GL NO. | Structure | Composition |
|---|---|---|
| 5401 | [chemical structure] | Hex(5)HexNAc(4)Fuc(0)NeuAc(1) |
| 5402 | [chemical structure] | Hex(5)HexNAc(4)Fuc(0)NeuAc(2) |
| 5412 | [chemical structure] | Hex(5)HexNAc(4)Fuc(1)NeuAc(2) |
| 6502 | [chemical structure] | Hex(6)HexNAc(5)Fuc(0)NeuAc(2) |
| 6513 | [chemical structure] | Hex(6)HexNAc(5)Fuc(1)NeuAc(3) |
| 7603 | [chemical structure] | Hex(7)HexNAc(6)Fuc(0)NeuAc(3) |

Legend for Table 4

[symbol]

Glc

[symbol]

Gal

[symbol]

Man

[symbol]

Fuc

[symbol]

NeuSAc

[symbol]

GlcNAc

[symbol]

GalNAc

[symbol]

ManNAc

### Example 3

[1183] This example demonstrates a study of the impact of trypsin amount on the resulting detected peak area for a glycopeptide.

[1184] To compare the effects of increasing trypsin amounts, a serum sample was prepared as described in Example 1 and 2 with a titration of trypsin protease amounts, ranging from 2 μg to 40 μg, corresponding to an enzyme to protein weight ratio of 1:400 to 1:20, respectively. A targeted set of glycoforms (i.e., same parent peptide sequence with different glycosylation) and the expected peptide fragments were then quantified and analyzed to determine the optimal concentration for peak peptide digestion efficiency. In this example, a glycoform was chosen that had a missed trypsin cleavage. As shown in FIG. 6, different parent fragments have vastly different abundances in the presence of low amounts of trypsin protease. In the presence of higher trypsin concentrations, the parent peptides are digested to the expected peptide fragments and reduce the amount of missed cleavage for each parent peptide. The higher trypsin to protein weight ratio presumably helps overcome any steric effects caused by the glycans proximate to the cleavage site. This increase in digestion efficiency resulted in higher peptide fragment signal and increased reproducibility by reducing the amount of missed tryptic cleavages. However, at higher concentrations of trypsin, an increase in non-specific cleavage can be observed.

[1185] Thus, accounting for digestion efficiency and non-specific cleavage, this work demonstrated that an enzyme to protein ratio of about 1:40 maximized the MS signal for expected sample peptide fragments and helped reduce the amount of missed tryptic cleavages.

### Example 4

[1186] This example demonstrates context-specific use of one or more proteases and assessment for the improvement of sample signal reproducibility.

[1187] Serum sample digestion and plasma sample digestion was performed according to Examples 1 and 2 (using thermal denaturation and the diverter valve). Serum and plasma samples were digested with two lots of various proteases (Trypsin gold and Trypsin gold plus LysC) and a control protease reagent before being further processed and analyzed for sample reproducibility, as determined by the linear relationship. For serum samples, lot-to-lot reproducibility of trypsin alone was better than trypsin plus LysC, as shown in FIGS. 7A and 7B where each data point corresponds to a measured abundance value for either a peptide or glycopeptide generated with lot 1 and lot 2. The cloud of scatter points in FIG. 7A was tighter and closer to the unity line for the case where 2 lots of only methylated trypsin compared to the cloud of scatter points in FIG. 7B that was more diffuse from the unity line for the case where 2 lots of methylated trypsin plus LysC were tested for variability. For plasma samples, lot-to-lot reproducibility of trypsin plus LysC was better than trypsin alone, as shown in FIGS. 8A and 8B. The cloud of scatter points in FIG. 8A was more diffuse and away from the unity line for the case where 2 lots of only methylated trypsin compared to the cloud of scatter points in FIG. 8B that was more compact and closer to the unity line for the case where 2 lots of methylated trypsin plus LysC were tested for variability.

[1188] Thus, the use of trypsin plus LysC digestion demonstrated improved reproducibility for plasma sample analysis, but not serum sample analysis.

### Example 5

[1189] This example demonstrates a study of performing sample reduction with different DTT concentrations (10 mM or 20 mM), DTT incubation temperatures (37° C. or 60° C.), and DTT incubation duration (30 minutes or 50 minutes.

[1190] To compare the effects of varying reduction conditions, a serum sample was prepared as described in Example 1 and 2 with the reduction step containing two different reaction conditions. Standard DTT reduction practice entails incubation with 10 or 20 mM DTT at 37° C. for 30 minutes, and this was compared to 10 or 20 mM DTT at 60° C. for 50 minutes as illustrated by FIG. 9A. After sample reduction, the samples were processed and injected into the instrument for MS analysis. As shown in FIG. 9B, DTT reduction at higher temperatures and for longer times significantly reduced the amount of missed cleavage in the serum sample at both DTT concentrations. This is observed broadly across most of the quantified parent peptides and expected fragment peptides.

### Example 6

[1191] This Example demonstrates a study of sample signal when using formic acid to quench a protease, trypsin, after digestion.

[1192] After sample digestion by trypsin protease, 20 μL of freshly prepared 9% formic acid solution was added to one of the sample wells. The other sample well was treated with a control buffer to compare the effects of trypsin quenching after sample digestion. The plates were then sealed with a foil heat seal using a plate sealer. To ensure all samples were mixed thoroughly, the plates were vortexed at 1400 RPM for 1 minute on a microplate mixer, followed by centrifugation at 370×g for 1 minute. Each sample was further processed as described in Example 2 and directly injected on the UHPLC-QQQ instrument. To compare signal reproducibility of the two sample preparations, a particular peptide fragments RPAIAINNPYVPR was targeted for each sample and analyzed every hour for 10 days. As shown in FIG. 10, the peptide fragment signal obtained from the unquenched sample declined over the extended time course. This decline in signal is linear and significant effects are observed within the first 24 hours of analysis that was caused by the non-specific cleavage that occurred at the first R group adjacent to the proline residue. The quenched sample did not display this decline and the peptide fragment signal remains constant during the 10 day time course.

[1193] Thus, the complete protease inactivation by formic acid quenching demonstrates improved sample integrity for robust and reproducible signal analysis by reducing the amount of non-specific tryptic cleavages at a lysine or arginine that is adjacent to a proline.

### Example 7

[1194] This example demonstrates a method for processing a proteolytically digested sample to produce a processed sample suitable for use in a liquid chromatography-mass spectrometry (LC-MS) analysis, the method comprising subjecting a proteolytically digested sample to a solid phase extraction column comprising a C18 reversed-phase medium using a polypeptide loading amount relative to the binding capacity of the solid phase extraction column that results in improved peptide and glycopeptide analysis.

[1195] Human serum samples were subjected to a proteolytic digestion technique with trypsin. Briefly, each sample and control was gently vortexed for 10 seconds. Using a single channel pipette, 5 μL of serum sample or control was transferred into a deep-well digestion plate, wherein the plate is compatible with thermal cycling. To this, the 35 μL of 50 mM ammonium bicarbonate solution was added. The plates were then sealed with a foil heat seal using a plate sealer. To ensure all samples were mixed thoroughly, the plates were vortexed at 1400 RPM for 1 minute on a microplate mixer, followed by centrifugation at 370×g for 1 minute. A separate sample plate was incubated in a thermal cycler for 5 minutes, wherein the thermal cycler was set to 100° C. with a lid temperature of 105° C. All heated plates were allowed to cool to room temperature before removing from the respective heat source and spinning at 370×g for 1 minute. After the spin, the plate seals were removed. After protein denaturation, all samples were reduced by adding 20 μL of the 50 mM DTT solution into each sample and control well. The plates were then sealed with a foil heat seal using a plate sealer. To ensure all samples were mixed thoroughly, the plates were vortexed at 1400 RPM for 1 minute on a microplate mixer, followed by centrifugation at 370×g for 1 minute. Plates were then incubated in a 60° C. water bath for 50 minutes. Plates were then removed from the water bath and centrifuged at 4,800×g for 1 minute before removing the plate seals. Samples were alkylated by adding 20 μL of the 90 mM IAA solution into each sample and control well. The plates were then sealed with a foil heat seal using a plate sealer. To ensure all samples were mixed thoroughly, the plates were vortexed at 1400 RPM for 1 minute on a microplate mixer, followed by centrifugation at 370×g for 1 minute. Plates were then incubated in the dark at room temperature for 30 minutes. After the incubation, plate seals were removed and 10 μL of the 50 mM DTT solution was added to quench any remaining IAA in solution. The plates were then sealed with a foil heat seal using a plate sealer and vortexed at 1400 RPM for 1 minute on a microplate mixer. Plates were centrifuged at 370×g for 1 minute and the plate seals were removed. A trypsin digestion was then performed followed by quenching of the protease via addition of an acid.

[1196] The resulting peptides were loaded onto AssayMAP C18 reversed-phase cartridges on an Agilent Bravo Platform for sample clean-up, followed by analysis on a triple quadrupole mass spectrometer in dynamic multiple reaction monitoring (dMRM) mode. 1,158 MRM transitions were used to quantify 525 glycopeptides and 151 peptides. An aliquot of the proteolytically digested was set aside to use as a control that was directly subjected to analysis on the triple quadrupole mass spectrometer.

[1197] For the AssayMap C18 workflow, which was designed to be fully automated, 30 μL of the proteolytically digested sample was transferred from a sample plate in a first position to another sample plate (e.g., Greiner clear v-bottomed plate) in a second position. The transferred sample was not mixed, and the sample plate was removed from the first position, sealed with a plate sealer, and placed in a 4° C. fridge. To a reagent plate (e.g., Greiner white u-bottomed plate, 50 μL of sample buffer (5% trifluoracetic acid (TFA) in water) was added and this plate was positioned in the first position. From this plate, 22 μL of sample buffer was transferred from the reagent plate to the sample Greiner clear v-bottomed plate in the second position. To the reagent plate, 200 μL of Mili-Q water was added. From this, 168 μL of Mili-Q water was transferred to the sample plate in the second position and mixed for 20 cycles.

[1198] For sample clean-up, the sample plate was moved from a second position to a third position, and a waste collection plate was placed in a fourth position. In a new 1.2 mL Abgene plate placed in the second position, 800 μL of equilibration/cartridge wash buffer (0.5% TFA in water) was added to each well. Then, in a second Abgene plate placed in a fifth position, 400 μL of priming/syringe wash buffer (50% Acetonitrile (ACN), 0.1% TFA in water) was added to each well. Next, the AssayMap C18 cartridges were placed onto the seating section and part 1 of the AssayMap C18 clean-up protocol was initiated. Sample loading amounts of 10 μg to 250 μg were evaluated.

[1199] First, an initial syringe wash was completed with a priming/syringe wash buffer (50% ACN, 0.1% TFA) for 4 wash cycles where the buffer does not flow through the C18 cartridge, followed by a priming step of flowing 100 μL of the priming/syringe wash buffer at 10 μL/min through the C18 cartridge, and an equilibration step of flowing 50 μL of the equilibration/cartridge wash buffer (0.5% TFA) at 10 μL/min through the C18 cartridge. Sample was then loaded onto the resin at a volume ranging from 100 μL to 200 μL at 3 μL/min. The cartridge was then subjected to an internal wash (200 μL at 3 μL/min-10 μL/min). Excess priming/syringe wash buffer was removed from the Abgene plate in the fifth position and replaced with 400 μL of fresh priming/syringe wash buffer in each well. To a new Greiner clear v-bottomed plate in a sixth position, 130 μL of elution buffer (80% ACN, 0.1% TFA in water) was added to each well. Next, a new Greiner clear v-bottomed plate was placed in a seventh position. Part 2 of the AssayMap C18 clean-up was then initiated, starting with a stringent syringe wash with 100 μL of the priming/syringe wash buffer for 2 wash cycles. Sample was then eluted with 100 μL of the elution buffer at 3 L/min so that the processed sample can be collected.

[1200] After completion of the AssayMap C18 clean-up protocol, the processed samples were dried using a SpeedVac evaporator and stored in a dried, sealed state at −20° C. until ready for LC-MS analysis. For the LC-MS analysis, samples were reconstituted and an internal standard (30 μL) was added to each sample well, which was then sealed with a thermal plate sealer. Samples were vortexed for 5 minutes on a plate shaker at 1400 RPM, sonicated for 1 minute in a water bath and centrifuged for 2 minutes at 4,700 RPM before being transferred to an Eppendorf plate for subsequent LC-MS analysis.

[1201] FIG. 11A shows the median CV % results for a sample not subjected to the sample clean-up procedure described above, and for sample loading amounts of 10 μg, 30 μg, 60 μg, 100 μg, 150 μg, and 250 μg. The coefficient of variation (CV) is a statistical measurement that describes the dispersion of the standard deviation in the data set, and is a key metric for assessing the quality and reproducibility of a given proteomic data set. A plurality of non-glycosylated peptides and glycopeptides were monitored via the MRM technique for sample cleaned with the C18 cartridge having different sample loading amounts. The CV % of four replicates was calculated from the area under the curve of the raw abundance peaks for the plurality of non-glycosylated peptides and glycopeptides. The CV % was less than 15% for glycopeptide sample loading between 30 μg and 150 μg which is a relatively low value that is difficult to achieve for glycopeptide analysis. For reference, recommended precision values of 15% for validating chromatographic assays can be found in “Bioanalytical Method Validation Guidance for Industry, U.S. Department of Health and Human Services, Food and Drug Administration, Center for Drug Evaluation and Research (CDER), Center for Veterinary Medicine (CVM), May 2018, Biopharmaceutics, p 24”. 60 μg and 100 μg sample loading amounts gave improved and comparable median CV % for both peptides and glycopeptides as compared to no sample clean-up and other sample loading amounts. Although the no C18 clean-up (control) showed a relatively low CV % compared to the C18 clean-up experiments at various loading amounts, it is worthwhile to note that the no C18 clean-up sample may contribute to excess salt being inputted into a MS that can cause a contamination problem resulting in operational downtime where an undesirable system maintenance procedure needs to be performed. Thus, under certain circumstances where the measurement process suffers an interference or contaminated mass spectrometer issue due to relatively low salt concentrations, the reverse-phase clean-up method described herein can have an advantage over the no C18 clean up. In addition, where the desired target glycopeptide for MS measurement is efficiently bound be the reverse-phase material and then efficiently eluted from the reverse-phase material, the reverse-phase clean-up method described herein can have an advantage over the no C18 clean up. FIGS. 11B and 11C show plots of the log₂ difference for sialylated glycopeptide species having various terminal sialic acids observed for various loading amounts. The log₂ difference corresponds to the log₂ (raw abundance values with C18 treatment—raw abundance values without C18) for all measured glycopeptides. The log₂ difference values of all the measured glycopeptides were categorized based on the number of sialic acid moieties such as 0, 1, 2, 3, or 4. A greater loss of sialylated glycopeptides was observed with increasing sample loading amounts. With the 30 μg and 60 μg sample loading amount, no significant loss of glycopeptides with less than 3 terminal sialic acids was observed when compared to non-sialylated glycopeptides.

### Example 8

[1202] This example demonstrates a method for processing a proteolytically digested sample to produce a processed sample suitable for use in a liquid chromatography-mass spectrometry (LC-MS) analysis, the method comprising subjecting a proteolytically digested sample to a solid phase extraction column comprising a C18 reversed-phase medium using a polypeptide loading concentration or a wash flow rate that results in improved peptide and glycopeptide analysis.

[1203] Proteolytic digestion of human serum samples were performed as described in Example 7. The AssayMap C18 workflow was as described in Example 7 and using the seven workflows described in Table 5. The LC-MS analysis was performed as described in Example 7. The sample loading amount of 60 μg was used for all workflows. A control (C) was performed by subjecting the proteolytically digested sample without sample clean-up to the LC-MS analysis.

TABLE 5
AssayMap workflows.

| Workflow | 1 | 2 | 3 | 4 | 5 | 6 | 7 |
|---|---|---|---|---|---|---|---|
| Sample buffer | 0.1% TFA | 0.5% TFA | 0.5% TFA | 0.5% TFA | 0.5% TFA | 0.5% TFA | 0.5% TFA |
| | | | 5% ACN | | | | |
| Equilibration buffer | 0.1% TFA | 0.1% TFA | 0.1% TFA | 0.5% TFA | 0.1% TFA | 0.1% TFA | 0.1% TFA |
| Loading volume | 100 μL | 100 μL | 100 μL | 100 μL | 200 μL | 2 × 100 μL | 100 μL |
| Loading flow rate | 3 μL/ | 3 μL/ | 3 μL/ | 3 μL/ | 3 μL/ | 3 μL/ | 3 μL/ |
| | minute | minute | minute | minute | minute | minute | minute |
| Washing flow rate | 10 μL/ | 10 μL/ | 10 μL/ | 10 μL/ | 10 μL/ | 10 μL/ | 3 μL/ |
| | minute | minute | minute | minute | minute | minute | minute |

[1204] FIGS. 12A and 12B provide plots of CV % for the control (C) workflow and workflows 1-7 as observed for both peptides and glycopeptides monitored using the LC-MS analysis. For workflow 6, the 2×100 μL loading volume represents a 100 μL volume of sample flowed through the C18 cartridge, the outputted volume was collected, and then the same outputted volume was re-loaded by flowing it though the C18 cartridge. Workflows 2, 4, 5, and 7 have comparable CV % of glycopeptides and peptides to the workflow without C18 clean-up (control; C). FIGS. 12C and 12D provide unity plot comparisons between certain workflows (the unity line is indicated as a dashed line). In reference to FIG. 12C, the x-axis refers to area under the curve (AUC) values for raw abundance values measured for a panel of glycopeptides generated using Workflow 2 while the y-axis refers to AUC values measured for the same panel of glycopeptides generated using Workflow 7. Similarly, in FIG. 12D, the x-axis refers to AUC values measured for a panel of glycopeptides generated using Workflow 2 while the y-axis refers to AUC values measured for the same panel of glycopeptides generated using Workflow 5. As shown in FIG. 12C, workflow 7 provided a better recovery of low-to-mid-abundance glycopeptides as compared to workflow 2 thus demonstrating improved results with a washing flow rate of about 3 μL/minute. As shown in FIG. 12D, workflow 5 provided a better recovery of low-to-mid-abundance glycopeptides as compared to workflow 2 thus demonstrating improved results with a with a 200 μL loading volume that corresponds to a loading concentration of 0.3 μg/μL. For FIGS. 12C and 12D, the low-to-mid-abundance glycopeptides were the ones having an AUC of less than 2500 with respect to workflow 2.

### Example 9

[1205] This example demonstrates a method for processing a proteolytically digested sample to produce a processed sample suitable for use in a liquid chromatography-mass spectrometry (LC-MS) analysis, the method comprising subjecting a proteolytically digested sample to a solid phase extraction column comprising an RP-S reversed-phase medium using a polypeptide loading amount that results in improved peptide and glycopeptide analysis.

[1206] The AssayMAP 5 μL Reversed Phase (RP-S) cartridge (catalog no. G5496-60033; Agilent Technologies) was in a manner similar to Example 8. Proteolytic digestion of human serum samples were performed as described in Example 7. The LC-MS analysis was performed as described in Example 7. Sample loading amounts of 10 μg to 250 μg were evaluated.

[1207] As compared to a sample loading amount of 250 μg, 200 μg, 150 μg, and 10 μg, sample loading amounts of 100 μg and 60 μg demonstrated improved mean CV % of 13.21% and 13.66%, respectively, and improved median CV % of 9.53% and 10.25%, respectively. Table 6 provides the CV % obtained for specified sample loading amounts.

TABLE 6
CV % for sample loading amounts obtained
from RP-S sample clean-up.

| | 250 μg | 200 μg | 150 μg | 100 μg | 60 μg | 10 μg |
|---|---|---|---|---|---|---|
| Mean CV % | 16.5 | 13.49 | 16.18 | 13.21 | 13.66 | 24.39 |
| Median CV % | 12.67 | 10.08 | 13.80 | 9.53 | 10.25 | 21.73 |

[1208] The AssayMap RP-S results obtained with a 60 μg loading amount were compared with results obtained with a 60 μg loading amount using an AssayMap C18 procedure described in Example 7. In FIG. 13A of the x-axis, the log₂ peak area corresponds to the log₂ (raw abundance peak area values with C18 treatment-raw abundance peak area values without C18) for all measured glycopeptides. In FIG. 13B of the x-axis, the log₂ peak area corresponds to the log₂ (raw abundance peak area values with RP-S treatment-raw abundance peak area values without RP-S treatment) for all measured glycopeptides. As shown in FIGS. 13A and 13B, the log₂ difference of peak area for analyzed sialyated glycopeptide species were comparable across varying numbers of sialic acid moieties in the glycan structure.

### Example 10

[1209] This example describes a method for quantifying biological markers from a serum sample comprising dried serum spot (DSS) sample collection followed by sample processing, and mass spectrometry (MS) analysis.

[1210] To compare the biological marker abundance of serum prepared from standard phlebotomy (venipuncture) and serum prepared from venipuncture blood, samples from a healthy individual were differentially prepared. Serum from finger-prick blood (˜50 μL) was spotted onto a Whatman 903 protein SaverCard (Cytiva) and allowed to dry for about >1 day at room temperature. After drying, 3 discs of 3 mm diameter were punched (i.e., removed) from each DSS card in preparation for sample extraction. DSS discs were placed in a new tube and resuspended in 100 μL of ammonium bicarbonate (50 mM) and dithiothreitol (DTT) (16.67 mM) solution. This solution was sonicated for 5 minutes before thermal denaturation, wherein samples were heated to 95° C. for 10 minutes, allowed to cool to ambient temperature for 5 minutes, and then heated to 60° C. for an additional 50 minutes. From this, 75 μL of denatured sample solution was transferred to a new tube. To this, 600 μL of ethanol (EtOH, 100%) was added and incubated overnight at −80° C. to precipitate protein content. Samples were then centrifuged at 20,000 relative centrifugal force (RCF) and dried. Ammonium bicarbonate and DTT solution was added to the dried material and incubated at 60° C. for 50 minutes to resolubilize protein content. The resulting solution was alkylated and reduced with an iodoacetamide (IAA, 90 mM) solution, followed by addition of a DTT solution. To the quenched (i.e., alkylated) biological samples and controls, 60 μL of the 0.167 μg/μL trypsin solution was added to each well. Digestion samples were incubated at 37° C. for 18 hours before formic acid was added to a 1% v/v for each sample to quench enzymatic digestion. Quenched samples were transferred to an injection plate and were subjected to LC-MS analysis, specifically MRM, to quantify peptide (i.e., marker) abundance for each processing method.

[1211] Serum derived from venipuncture or finger-prick (5 μL) was placed in a new tube. To this, 35 μL of ammonium bicarbonate (50 mM) was added. This solution was thermally denatured, wherein samples were heated to 100° C. for 5 minutes, allowed to cool to room temperature for 5 minutes, then mixed with 20 μL of 50 mM DTT, and then heated to 60° C. for an additional 50 minutes. The resulting solution was alkylated and reduced with 20 μL of 90 mM iodoacetamide (IAA) solution, followed by addition of 10 μL of a 50 mM DTT solution. To the quenched (i.e., alkylated) biological samples and controls, 60 μL of the 0.167 μg/μL trypsin solution was added to each well. Digestion samples were incubated at 37° C. for 18 hours before formic acid was added to a 1% v/v for each sample to quench enzymatic digestion. Quenched samples were transferred to an injection plate and were subjected to LC-MS analysis, specifically MRM, to quantify peptide (i.e., marker) abundance for each processing method.

[1212] As shown in FIGS. 15A and 15B, comparison of serum prepared and processed from standard phlebotomy (venipuncture, HuSer) verses from finger-prick blood (HuCSer) showed significant correlation for peptide abundances (FIG. 15A), wherein R=0.992. In the legend, gp, pep, and quant represent glycopeptides, peptides, and other peptides, respectively. The two methods also showed comparable coefficients of variance (CV) (FIG. 15B) across the full proteomic dataset (731 markers). Thus, this work demonstrates finger-prick sample collection as a viable method for quantifying biological markers from a serum sample prepared from either a venipuncture or a finger-prick.

### Example 11

[1213] This example demonstrates a high correlation of biological marker abundance between two different serum absorbent or bibulous members, namely serum separated from finger-prick blood (HEMA; Hemaspot SE) and venous serum dried on a dried blood spot card (DSS) with capillary serum prepared from finger-prick blood and venous serum prepared from venipuncture collected blood, respectively.

[1214] All serum samples were collected from the same individual. To compare the biological marker abundance of serum prepared from serum separated from finger-prick blood (HEMA), serum prepared from capillary finger-prick blood (HuCSer), serum prepared from venous blood (HuSer), and venous serum dried on DBS card (DSS) were either spotted prior to processing or directly processed as described in Example 10.

[1215] As shown in FIG. 16A, comparison of serum separated from finger-prick blood (HEMA) and serum prepared from capillary finger-prick blood (HuCSer) showed significant correlation for peptide abundances across the full proteomic dataset (Pearson's R˜0.98) and an acceptable median coefficient of variance (CV) of 0.16 between 3 replicates for 731 markers (FIG. 16C). As shown in FIG. 16B, comparison of venous serum (HuSer) and capillary serum dried on a DBS card (DSS) showed significant correlation for peptide abundances across the full proteomic dataset (Pearson's R˜0.93) and an acceptable median coefficient of variance (CV) of 0.24 between 3 replicates for 731 markers (FIG. 16C). In the legend of FIGS. 16A and 16B, gp, pep, and quant represent glycopeptides, peptides, and other peptides, respectively. Thus, this work demonstrates a high correlation of biological marker abundance between two different serum separating techniques, suggesting that DBS card separation and processing is a viable and cost-effective alternative.

### Example 12

[1216] This example demonstrates a dried blood spot (DBS) method for a LC-MS analysis of one or more glycopeptides from a blood spot card, wherein one or more extraction internal standards, including a polypeptide standard, is applied to the blood spot card prior to depositing a blood sample thereon. The polypeptide standard can include one or more polypeptides from SEQ ID NOS: 14-16, 18, and 22.

[1217] Blood spot cards are obtained having one or more extraction internal standards, including a polypeptide standard, deposited and dried thereon. The one or more extraction internal standards are applied in a known amount and in a known location on the dried blood spot card.

[1218] Whole blood samples are collected from individuals, e.g., by using a lancet to the finger or heel and applying the resulting blood to a delimited zone of a blood spot card. Replicate blood samples are obtained. After receipt of the blood spot cards, 3 or more discs of 3 mm diameter are punched and removed from each DBS card in preparation for sample extraction. DBS discs are placed in a new tube and resuspended in 100 μL of ammonium bicarbonate (50 mM) and dithiothreitol (DTT) (16.67 mM) solution. This solution is sonicated for 5 minutes before thermal denaturation, wherein samples are heated to 95° C. for 10 minutes, allowed to cool at ambient temperature for 5 minutes, and then are heated to 60° C. for an additional 50 minutes. From this, 75 μL of denatured sample solution is transferred to a new tube. To this, >600 μL of ethanol (EtOH, 100%) is added and incubated overnight to precipitate protein content. Samples are centrifuged at 20,000 RCF (10 minutes) and dried. Ammonium bicarbonate and DTT solution is added to the dried material and is incubated at 60° C. for 50 minutes to resolubilize protein content. The resulting solution is alkylated and reduced with an iodoacetamide (IAA, 90 mM) solution, followed by addition of a DTT solution. To the quenched (i.e., alkylated) biological samples, 60 μL of the 0.167 μg/μL trypsin solution is added to each well and another protein SEQ ID NO: 17. Because protein SEQ ID NO: 17. can be difficult to digest with trypsin, this protein is useful for monitoring the digestion efficiency by monitoring peptides generated from the digestion of protein SEQ ID NO: 17. Digestion samples are incubated at 37° C. for 18 hours before formic acid is added to 1% (v/v) for each sample to quench enzymatic digestion. To this, additional polypeptide standards, such as quantitative polypeptide standards, may be added. The samples are transferred to an injection plate, and are then subjected to LC-MS analysis.

### Example 13

[1219] This example demonstrates a DBS extraction and analysis method for measuring peptides and glycopeptides with LC-MS of an individual with advanced ovarian cancer and another individual with benign pelvic tumors. To compare results, serum samples were collected and analyzed in parallel using venous blood and DBS sample.

[1220] FIG. 17A shows a distribution of coefficient-of-variation (CV) values for each transition monitored for n=3 replicate digestions of capillary serum and DBS samples collected from the same individual. The median of the 734 CVs were 0.09 for capillary serum and 0.17 for DBS. Correlation amongst the sample set was performed for each marker, where 40 out of 530 analytes had R≥0.85. When considered individually for each patient sample, peptide abundances between DBS and serum samples (median R_{qpep}=0.94) are well correlated, suggesting glycoprotein extraction efficiency is not a major concern. As shown in FIG. 17B, healthy patient #11 had a correlation of Pearson R=0.89 for raw abundance, when compared to serum analysis. In FIG. 17C, advanced cancer patient #26 had a correlation of Pearson R=0.91 for raw abundance when compared to serum analysis. As shown in FIG. 18, a decreased correlation for glycopeptides (median R_{glyco}=0.81) compared to peptides may be a result of increased interference from sample matrix in DBS or lower signal-to-noise, due to lower transmission efficiency in triple quadrupole MS. Further, principal component analysis (PCA) of glycoproteomic signatures showed DBS and serum samples separated along first principal component, but also separated by malignancy along the same axis in the second component, demonstrating the ability to discriminate between benign and malignant tumor samples (FIG. 17D), using either approach.

[1221] Thus, this study demonstrates a DBS extraction and analysis method for discriminating between malignant and benign tumors based upon a glycoproteomic signature.

### Example 14

[1222] An MRM analysis was performed on DBS samples from advanced ovarian cancer (malignant pelvic tumor) and control (benign pelvic tumor) patients. Relative abundances of 17 glycopeptides were found to be significantly different between the malignant and benign pelvic tumor samples without adjusting for false discovery rate (FDR). The glycoproteins associated with these glycopeptides are summarized in Table 8. The amino acid sequences and other structural characteristics of the glycopeptides having significantly fold changes are provided in Table 9. In Table 10, the glycan structures for these glycopeptides are provided, with an associated glycan structure legend. LC-MRM-MS parameters for the peptide structures are summarized in Table 11.

TABLE 8
Glycoproteins associated with pelvic tumors

| SEQ | | | | |
|---|---|---|---|---|
| ID | Protein | Protein | Uniprot | |
| NO | Abbreviation | Name | ID | Protein Sequence |
| 23 | AACT | Alpha-1- | P01011 | MERMLPLLALGLLAAGFCPAVLCHPNSPLD |
| | | antichymotrypsin | | EENLTQENQDRGTHVDLGLASANVDFAFSL |
| | | | | YKQLVLKAPDKNVIFSPLSISTALAFLSLGAH |
| | | | | NTTLTEILKGLKFNLTETSEAEIHQSFQHLLR |
| | | | | TLNQSSDELQLSMGNAMFVKEQLSLLDRFT |
| | | | | EDAKRLYGSEAFATDFQDSAAAKKLINDYV |
| | | | | KNGTRGKITDLIKDLDSQTMMVLVNYIFFK |
| | | | | AKWEMPFDPQDTHQSRFYLSKKKWVMVP |
| | | | | MMSLHHLTIPYFRDEELSCTVVELKYTGNAS |
| | | | | ALFILPDQDKMEEVEAMLLPETLKRWRDSL |
| | | | | EFREIGELYLPKFSISRDYNLNDILLQLGIEEA |
| | | | | FTSKADLSGITGARNLAVSQVVHKAVLDVF |
| | | | | EEGTEASAATAVKITLLSALVETRTIVRFNRP |
| | | | | FLMIIVPTDTQNIFFMSKVTNPKQA |
| 24 | CLUS | Clusterin | P10909 | MMKTLLLFVGLLLTWESGQVLGDQTVSDN |
| | | | | ELQEMSNQGSKYVNKEIQNAVNGVKQIKTL |
| | | | | IEKTNEERKTLLSNLEEAKKKKEDALNETRES |
| | | | | ETKLKELPGVCNETMMALWEECKPCLKQT |
| | | | | CMKFYARVCRSGSGLVGRQLEEFLNQSSPFY |
| | | | | FWMNGDRIDSLLENDRQQTHMLDVMQDH |
| | | | | FSRASSIIDELFQDRFFTREPQDTYHYLPFSLP |
| | | | | HRRPHFFFPKSRIVRSLMPFSPYEPLNFHAM |
| | | | | FQPFLEMIHEAQQAMDIHFHSPAFQHPPTE |
| | | | | FIREGDDDRTVCREIRHNSTGCLRMKDQCD |
| | | | | KCREILSVDCSTNNPSQAKLRRELDESLQVA |
| | | | | ERLTRKYNELLKSYQWKMLNTSSLLEQLNE |
| | | | | QFNWVSRLANLTQGEDQYYLRVTTVASHT |
| | | | | SDSDVPSGVTEVVVKLFDSDPITVTVPVEVS |
| | | | | RKNPKFMETVAEKALQEYRKKHREE |
| 25 | KLKB1 | Plasma | P03952 | MILFKQATYFISLFATVSCGCLTQLYENAFFR |
| | | kallikrein | | GGDVASMYTPNAQYCQMRCTFHPRCLLFS |
| | | | | FLPASSINDMEKRFGCFLKDSVTGTLPKVHR |
| | | | | TGAVSGHSLKQCGHQISACHRDIYKGVDM |
| | | | | RGVNFNVSKVSSVEECQKRCTNNIRCQFFSY |
| | | | | ATQTFHKAEYRNNCLLKYSPGGTPTAIKVLS |
| | | | | NVESGFSLKPCALSEIGCHIMNIFQHLAFSDV |
| | | | | DVARVLTPDAFVCRTICTYHPNCLFFTFYTN |
| | | | | VWKIESQRNVCLLKTSESGTPSSSTPQENTIS |
| | | | | GYSLLTCKRTLPEPCHSKIYPGVDFGGEELN |
| | | | | VTFVKGVNVCQETCTKMIRCQFFTYSLLPE |
| | | | | DCKEEKCKCFLRLSMDGSPTRIAYGTQGSSG |
| | | | | YSLRLCNTGDNSVCTTKTSTRIVGGTNSSWG |
| | | | | EWPWQVSLQVKLTAQRHLCGGSLIGHQW |
| | | | | VLTAAHCFDGLPLQDVWRIYSGILNLSDITK |
| | | | | DTPFSQIKEIIIHQNYKVSEGNHDIALIKLQA |
| | | | | PLNYTEFQKPICLPSKGDTSTIYTNCWVTG |
| | | | | WGFSKEKGEIQNILQKVNIPLVTNEECQKR |
| | | | | YQDYKITQRMVCAGYKEGGKDACKGDSGG |
| | | | | PLVCKINGMWRLVGITSWGEGCARREQP |
| | | | | GVYTKVAEYMDWILEKTQSSDGKAQMQSP |
| | | | | A |
| 26 | KNG1 | Kininogen-1 | P01042 | MKLITILFLCSRLLLSLTQESQSEEIDCNDKDL |
| | | | | FKAVDAALKKYNSQNQSNNQFVLYRITEAT |
| | | | | KTVGSDTFYSFKYEIKEGDCPVQSGKTWQD |
| | | | | CEYKDAAKAATGECTATVGKRSSTKFSVAT |
| | | | | QTCQITPAEGPVVTAQYDCLGCVHPISTQS |
| | | | | PDLEPILRHGIQYFNNNTQHSSLFMLNEVKR |
| | | | | AQRQVVAGLNFRITYSIVQTNCSKENFLFLT |
| | | | | PDCKSLWNGDTGECTDNAYIDIQLRIASFSQ |
| | | | | NCDIYPGKDFVQPPTKICVGCPRDIPTNSPE |
| | | | | LEETLTHTITKLNAENNATFYFKIDNVKKAR |
| | | | | VQVVAGKKYFIDFVARETTCSKESNEELTES |
| | | | | CETKKLGQSLDCNAEVYVVPWEKKIYPTVN |
| | | | | CQPLGMISLMKRPPGFSPFRSSRIGEIKEETT |
| | | | | VSPPHTSMAPAQDEERDSGKEQGHTRRHD |
| | | | | WGHEKQRKHNLGHGHKHERDQGHGHQR |
| | | | | GHGLGHGHEQQHGLGHGHKFKLDDDLEH |
| | | | | QGGHVLDHGHKHKHGHGHGKHKNKGKK |
| | | | | NGKHNGWKTEHLASSSEDSTTPSAQTQEKT |
| | | | | EGPTPIPSLAKPGVTVTFSDFQDSDLIATMM |
| | | | | PPISPAPIQSDDDWIPDIQIDPNGLSFNPISDF |
| | | | | PDTTSPKCPGRPWKSVSEINPTTQMKESYYF |
| | | | | DLTDGLS |
| 27 | VTNC | Vitronectin | P04004 | MAPLRPLLILALLAWVALADQESCKGRCTE |
| | | | | GFNVDKKCQCDELCSYYQSCCTDYTAECKP |
| | | | | QVTRGDVFTMPEDEYTVYDDGEEKNNATV |
| | | | | HEQVGGPSLTSDLQAQSKGNPEQTPVLKPE |
| | | | | EEAPAPEVGASKPEGIDSRPETLHPGRPQPP |
| | | | | AEEELCSGKPFDAFTDLKNGSLFAFRGQYCY |
| | | | | ELDEKAVRPGYPKLIRDVWGIEGPIDAAFT |
| | | | | RINCQGKTYLFKGSQYWRFEDGVLDPDYPR |
| | | | | NISDGFDGIPDNVDAALALPAHSYSGRERV |
| | | | | YFFKGKQYWEYQFQHQPSQEECEGSSLSAV |
| | | | | FEHFAMMQRDSWEDIFELLFWGRTSAGTR |
| | | | | QPQFISRDWHIGVPGQVDAAMAGRIYISGM |
| | | | | APRPSLAKKQRFRHRNRKGYRSQRGHSRGR |
| | | | | NQNSRRPSRATWLSLESSEESNLGANNYDD |
| | | | | YRMDWLVPATCEPIQSVFFFSGDKYYRVNL |
| | | | | RTRRVDTVDPPYPRSIAQYWLGCPAPGHL |
| 28 | A2MG | Alpha-2- | P01023 | MGKNKLLHPSLVLLLLVLLPTDASVSGKPQY |
| | | macroglobulin | | MVLVPSLLHTETTEKGCVLLSYLNETVTVSA |
| | | | | SLESVRGNRSLFTDLEAENDVLHCVAFAVPK |
| | | | | SSSNEEVMFLTVQVKGPTQEFKKRTTVMVK |
| | | | | NEDSLVFVQTDKSIYKPGQTVKFRVVSMDE |
| | | | | NFHPLNELIPLVYIQDPKGNRIAQWQSFQLE |
| | | | | GGLKQFSFPLSSEPFQGSYKVVVQKKSGGRT |
| | | | | EHPFTVEEFVLPKFEVQVTVPKIITILEEEMN |
| | | | | VSVCGLYTYGKPVPGHVTVSICRKYSDASD |
| | | | | CHGEDSQAFCEKFSGQLNSHGCFYQQVKTK |
| | | | | VFQLKRKEYEMKLHTEAQIQEEGTVVELTG |
| | | | | RQSSEITRTITKLSFVKVDSHFRQGIPFFGQV |
| | | | | RLVDGKGVPIPNKVIFIRGNEANYYSNATTD |
| | | | | EHGLVQFSINTTNVMGTSLTVRVNYKDRSP |
| | | | | CYGYQWVSEEHEEAHHTAYLVFSPSKSFVH |
| | | | | LEPMSHELPCGHTQTVQAHYILNGGTLLGL |
| | | | | KKLSFYYLIMAKGGIVRTGTHIGLLVKQEDM |
| | | | | KGHFSISIPVKSDIAPVARLLIYAVLPTGDVI |
| | | | | GDSAKYDVENCLANKVDLSFSPSQSLPASHA |
| | | | | HLRVTAAPQSVCALRAVDQSVLLMKPDAE |
| | | | | LSASSVYNLLPEKDLTGFPGPLNDQDNEDCI |
| | | | | NRHNVYINGITYTPVSSTNEKDMYSFLEDM |
| | | | | GLKAFTNSKIRKPKMCPQLQQYEMHGPEGL |
| | | | | RVGFYESDVMGRGHARLVHVEEPHTETVR |
| | | | | KYFPETWIWDLVVVNSAGVAEVGVTVPDT |
| | | | | ITEWKAGAFCLSEDAGLGISSTASLRAFQPFF |
| | | | | VELTMPYSVIRGEAFTLKATVLNYLPKCIRV |
| | | | | SVQLEASPAFLAVPVEKEQAPHICICANGRQ |
| | | | | TVSWAVTPKSLGNVNFTVSAEALESQELCG |
| | | | | TEVPSVPEHGRKDTVIKPLLVEPEGLEKETT |
| | | | | FNSLLCPSGGEVSEELSLKLPPNVVEESARAS |
| | | | | VSVLGDILGSAMQNTQNLLQMPYGCGEQN |
| | | | | MVLFAPNIYVLDYLNETQQLTPEIKSKAIGY |
| | | | | LNTGYQRQLNYKHIYDGSYSTFGERYGRNQ |
| | | | | GNTWLTAFVLKTFAQARAYIFIDEAHITQA |
| | | | | LIWLSQRQKDNGCFRSSGSLLNNAIKGGVE |
| | | | | DEVTLSAYITIALLEIPLTVTHPVVRNALFCL |
| | | | | ESAWKTAQEGDHIGSHVYTKALLAYAFALA |
| | | | | GNQDKRKEVLKSLNEEAVKKDNSVHWERP |
| | | | | QKPKAPVGHFYEPQAPSAEVEMTSYVLLAY |
| | | | | LTAQPAPTSEDLTSATNIVKWITKQQNAQG |
| | | | | GFSSTQDTVVALHALSKYGAATFTRTGKAA |
| | | | | QVTIQSSGTFSSKFQVDNNNRLLLQQVSLPE |
| | | | | LPGEYSMKVTGEGGVYLQTSLKYNILPEKEE |
| | | | | FPFALGVQTLPQTCDEPKAHTSFQISLSVSYT |
| | | | | GSRSASNMAIVDVKMVSGFIPLKPTVKMLE |
| | | | | RSNHVSRTEVSSNHVLIYLDKVSNQTLSLFFT |
| | | | | VLQDVPVRDLKPAIVKVYDYYETDEFAIAE |
| | | | | YNAPCSKDLGNA |
| 29 | AGP12 | Alpha-1- | P02763/ | 1: |
| | | acid | P19652 | MALSWVLTVLSLLPLLEAQIPLCANLVPVPI |
| | | glycoprotein | | TNATLDQITGKWFYIASAFRNEEYNKSVQEI |
| | | 1 / 2 | | QATFFYFTPNKTEDTIFLREYQTRQDQCIYN |
| | | | | TTYLNVQRENGTISRYVGGQEHFAHLLILR |
| | | | | DTKTYMLAFDVNDEKNWGLSVYADKPETT |
| | | | | KEQLGEFYEALDCLRIPKSDVVYTDWKKDK |
| | | | | CEPLEKQHEKERKQEEGES |
| | | | | 2: |
| | | | | MALSWVLTVLSLLPLLEAQIPLCANLVPVPI |
| | | | | TNATLDRITGKWFYIASAFRNEEYNKSVQEI |
| | | | | QATFFYFTPNKTEDTIFLREYQTRQNQCFYN |
| | | | | SSYLNVQRENGTVSRYEGGREHVAHLLFLR |
| | | | | DTKTLMFGSYLDDEKNWGLSFYADKPETTK |
| | | | | EQLGEFYEALDGLCIPRSDVMYTDWKKDKC |
| | | | | EPLEKQHEKERKQEEGES |
| 30 | APOC3 | Apolipoprotein | P02656 | MQPRVLLVVALLALLASARASEAEDASLLSF |
| | | C- | | MQGYMKHATKTAKDALSSVQESQVAQQA |
| | | III | | RGWVTDGFSSLKDYWSTVKDKFSEFWDLD |
| | | | | PEVRPTSAVAA |
| 31 | CERU | Ceruloplasmin | P00450 | MKILILGIFLFLCSTPAWAKEKHYYIGIIETT |
| | | | | WDYASDHGEKKLISVDTEHSNIYLQNGPDR |
| | | | | IGRLYKKALYLQYTDETFRTTIEKPVWLGFL |
| | | | | GPIIKAETGDKVYVHLKNLASRPYTFHSHGI |
| | | | | TYYKEHEGATYPDNTTDFQRADDKVYPGE |
| | | | | QYTYMLLATEEQSPGEGDGNCVTRIYHSHI |
| | | | | DAPKDIASGLIGPLIICKKDSLDKEKEKHIDR |
| | | | | EFVVMFSVVDENFSWYLEDNIKTYCSEPEK |
| | | | | VDKDNEDFQESNRMYSVNGYTFGSLPGLSM |
| | | | | CAEDRVKWYLFGMGNEVDVHAAFFHGQA |
| | | | | LTNKNYRIDTINLFPATLFDAYMVAQNPGE |
| | | | | WMLSCQNLNHLKAGLQAFFQVQECNKSSS |
| | | | | KDNIRGKHVRHYYIAAEEIIWNYAPSGIDIF |
| | | | | TKENLTAPGSDSAVFFEQGTTRIGGSYKKLV |
| | | | | YREYTDASFTNRKERGPEEEHLGILGPVIWA |
| | | | | EVGDTIRVTFHNKGAYPLSIEPIGVRFNKNN |
| | | | | EGTYYSPNYNPQSRSVPPSASHVAPTETFTY |
| | | | | EWTVPKEVGPTNADPVCLAKMYYSAVDPT |
| | | | | KDIFTGLIGPMKICKKGSLHANGRQKDVDK |
| | | | | EFYLFPTVFDENESLLLEDNIRMFTTAPDQV |
| | | | | DKEDEDFQESNKMHSMNGFMYGNQPGLT |
| | | | | MCKGDSVVWYLFSAGNEADVHGIYFSGNT |
| | | | | YLWRGERRDTANLFPQTSLTLHMWPDTEG |
| | | | | TFNVECLTTDHYTGGMKQKYTVNQCRRQS |
| | | | | EDSTFYLGERTYYLAAVEVEWDYSPQREWE |
| | | | | KELHHLQEQNVSNAFLDKGEFYIGSKYKKV |
| | | | | VYRQYTDSTFRVPVERKAEEEHLGILGPQL |
| | | | | HADVGDKVKIIFKNMATRPYSIHAHGVQTE |
| | | | | SSTVTPTLPGETLTYVWKIPERSGAGTEDSA |
| | | | | CIPWAYYSTVDQVKDLYSGLIGPLIVCRRPY |
| | | | | LKVFNPRRKLEFALLFLVFDENESWYLDDNI |
| | | | | KTYSDHPEKVNKDDEEFIESNKMHAINGRM |
| | | | | FGNLQGLTMHVGDEVNWYLMGMGNEIDL |
| | | | | HTVHFHGHSFQYKHRGVYSSDVFDIFPGTY |
| | | | | QTLEMFPRTPGIWLLHCHVTDHIHAGMET |
| | | | | TYTVLQNEDTKSG |
| 32 | HPT | Haptoglobin | P00738 | MSALGAVIALLLWGQLFAVDSGNDVTDIA |
| | | | | DDGCPKPPEIAHGYVEHSVRYQCKNYYKLR |
| | | | | TEGDGVYTLNDKKQWINKAVGDKLPECEA |
| | | | | DDGCPKPPEIAHGYVEHSVRYQCKNYYKLR |
| | | | | TEGDGVYTLNNEKQWINKAVGDKLPECEA |
| | | | | VCGKPKNPANPVQRILGGHILDAKGSFPWQ |
| | | | | AKMVSHHNLTTGATLINEQWLLTTAKNLFL |
| | | | | NHSENATAKDIAPTLTLYVGKKQLVEIEKV |
| | | | | VLHPNYSQVDIGLIKLKQKVSVNERVMPICL |
| | | | | PSKDYAEVGRVGYVSGWGRNANFKFTDHL |
| | | | | KYVMLPVADQDQCIRHYEGSTVPEKKTPKS |
| | | | | PVGVQPILNEHITFCAGMSKYQEDTCYGDA |
| | | | | GSAFAVHDLEEDTWYATGILSFDKSCAVAE |
| | | | | YGVYVKVTSIQDWVQKTIAEN |
| 33 | IC1 | Plasma | P05155 | MASRLTLLTLLLLLLAGDRASSNPNATSSSSQ |
| | | protease | | DPESLQDRGEGKVATTVISKMLFVEPILEVSS |
| | | C1 | | LPTTNSTTNSATKITANTTDEPTTQPTTEPTT |
| | | inhibitor | | QPTIQPTQPTTQLPTDSPTQPTTGSFCPGPV |
| | | | | TLCSDLESISTEAVLGDALVDFSLKLYHAFS |
| | | | | AMKKVETNMAFSPFSIASLLTQVLLGAGEN |
| | | | | TKTNLESILSYPKDFTCVHQALKGFTTKGVT |
| | | | | SVSQIFHSPDLAIRDTFVNASRTLYSSSPRVLS |
| | | | | NNSDANLELINTWVAKNTNNKISRLLDSLPS |
| | | | | DTRLVLLNAIYLSAKWKTTFDPKKTRMEPF |
| | | | | HFKNSVIKVPMMNSKKYPVAHFIDQTLKAK |
| | | | | VGQLQLSHNLSLVILVPQNLKHRLEDMEQA |
| | | | | LSPSVFKAIMEKLEMSKFQPTLLTLPRIKVTT |
| | | | | SQDMLSIMEKLEFFDFSYDLNLCGLTEDPDL |
| | | | | QVSAMQHQTVLELTETGVEAAAASAISVAR |
| | | | | TLLVFEVQQPFLFVLWDQQHKFPVFMGRV |
| | | | | YDPRA |
| 34 | IGG2 | Immunoglobulin | P01859 | ASTKGPSVFPLAPCSRSTSESTAALGCLVKDY |
| | | heavy | | FPEPVTVSWNSGALTSGVHTFPAVLQSSGLY |
| | | constant | | SLSSVVTVPSSNFGTQTYTCNVDHKPSNTKV |
| | | gamma 2 | | DKTVERKCCVECPPCPAPPVAGPSVFLFPPK |
| | | | | PKDTLMISRTPEVTGVVVDVSHEDPEVQFN |
| | | | | WYVDGVEVHNAKTKPREEQFNSTFRVVSV |
| | | | | LTVVHQDWLNGKEYKCKVSNKGLPAPIEK |
| | | | | TISKTKGQPREPQVYTLPPSREEMTKNQVSL |
| | | | | TCLVKGFYPSDISVEWESNGQPENNYKTTP |
| | | | | PMLDSDGSFFLYSKLTVDKSRWQQGNVFSC |
| | | | | SVMHEALHNHYTQKSLSLSPGK |

TABLE 3
Peptide structures associated with pelvic tumors

| | | | Linking | Linking | |
|---|---|---|---|---|---|
| | | | Site Pos. | Site Pos. | |
| SEQ | Peptide Structure (PS) | | in Protein | in Peptide | Glycan |
| ID NO | NAME | Peptide Sequence | Sequence | Sequence | Structure |
| 35 | AACT_127_5401 | TLNQSSDELQL | 127 | 3 | 5401 |
| | | SMGNAMFVK | | | |
| 36 | AACT_127_5402 | TLNQSSDELQL | 127 | 3 | 5402 |
| | | SMGNAMFVK | | | |
| 37 | AACT_271_6503 | YTGNASALFIL | 271 | 4 | 6503 |
| | | PDQDK | | | |
| 38 | CLUS_291_5401 | HNSTGCLR | 291 | 2 | 5401 |
| 39 | KLKB1_308_5402 | IYPGVDFGGEE | 308 | 13 | 5402 |
| | | LNVTFVK | | | |
| 40 | KNG1_205_6513 | ITYSIVQTNCSK | 205 | 9 | 6513 |
| 41 | VTNC_242_6503 | NISDGFDGIPD | 242 | 1 | 6503 |
| | | NVDAALALPA | | | |
| | | HSYSGR | | | |
| 42 | VTNC_242_6513 | NISDGFDGIPD | 242 | 1 | 6513 |
| | | NVDAALALPA | | | |
| | | HSYSGR | | | |
| 43 | CERU_762_6513 | ELHHLQEQNV | 762 | 9 | 6513 |
| | | SNAFLDK | | | |
| 44 | AGP12_72_6513 | SVQEIQATFFY | 72 | 15 | 6513 |
| | | FTPNK | | | |
| 45 | IGG2_297_5410 | EEQFNSTFR | 297 | 5 | 5410 |
| 46 | A2MG_869_5200 | SLGNVNFTVSA | 869 | 6 | 5200 |
| | | EALESQELCGT | | | |
| | | EVPSVPEHGR | | | |
| 47 | AACT_106_5402 | FNLTETSEAEIH | 106 | 2 | 5402 |
| | | QSFQHLLR | | | |
| 48 | APOC3_74_1101 | FSEFWDLDPEV | 94 | 14 | 1101 |
| | | RPTSAVAA | | | |
| 49 | IC1_352_5402 | VGQLQLSHNLS | 352 | 9 | 5402 |
| | | LVILVPQNLK | | | |
| 50 | HPT_241_6513 | VVLHPNYSQV | 241 | 6 | 6513 |
| | | DIGLIK | | | |
| 51 | AGP12_72_7613 | SVQEIQATFFY | 72 | 15 | 7613 |
| | | FTPNK | | | |

TABLE 10
Glycan structure (GL NO), structure, and composition

| Glycan Structure GL NO. | Structure | Composition |
|---|---|---|
| 1101 | [chemical structure] | Hex(1)HexNAc(1)Fuc(0)NeuAc(1) |
| 5200 | [chemical structure] | Hex(5)HexNAc(2)Fuc(0)NeuAc(0) |
| 5401 | [chemical structure] | Hex(5)HexNAc(4)Fuc(0)NeuAc(1) |
| 5402 | [chemical structure] | Hex(5)HexNAc(4)Fuc(0)NeuAc(2) |
| 5410 | [chemical structure] | Hex(5)HexNAc(4)Fuc(1)NeuAc(0) |
| 6503 | [chemical structure] | Hex(6)HexNAc(5)Fuc(0)NeuAc(3) |
| 6513 | [chemical structure] | Hex(6)HexNAc(5)Fuc(1)NeuAc(3) |
| 7613 | [chemical structure] | Hex(7)HexNAc(6)Fuc(1)NeuAc(3) |

Legend for Table 10

[symbol]

Glc

[symbol]

Gal

[symbol]

Man

[symbol]

Fuc

[symbol]

NeuSAc

[symbol]

GlcNAc

[symbol]

GalNAc

[symbol]

ManNAc

TABLE 11
LC-MS parameters for MRM monitoring of peptide
structures associated with pelvic tumors

| | | Collision | | | 1^{st} | 1^{st} |
|---|---|---|---|---|---|---|
| SEQ | RT | Energy | Precursor | Precursor | product | product |
| ID NO | (min) | (V) | m/z | charge | m/z | charge |
| 35 | 33.080 | 20 | 1032.9 | 4 | 366.1 | 1 |
| 36 | 33.904 | 30 | 1105.7 | 4 | 204.1 | 1 |
| 37 | 31.496 | 25 | 1154.7 | 4 | 274.1 | 1 |
| 38 | 4.948 | 24 | 953.4 | 3 | 366.1 | 1 |
| 39 | 37.878 | 18 | 1048.4 | 4 | 1094.0 | 2 |
| 40 | 16.902 | 25 | 1106.4 | 4 | 274.1 | 1 |
| 41 | 37.750 | 25 | 1127.9 | 5 | 366.1 | 1 |
| 42 | 37.748 | 30 | 1157.1 | 5 | 274.1 | 1 |
| 43 | 20.800 | 30 | 1258.5 | 4 | 274.1 | 1 |
| 44 | 37.504 | 25 | 1324.3 | 4 | 366.1 | 1 |
| 45 | 12.728 | 20 | 976.1 | 3 | 366.1 | 1 |
| 46 | 34.426 | 23 | 1158.8 | 4 | 1206.9 | 3 |
| 47 | 37.156 | 30 | 922.2 | 5 | 204.1 | 1 |
| 48 | 37.654 | 22 | 931.8 | 3 | 274.1 | 1 |
| 49 | 39.378 | 35 | 1130.8 | 4 | 204.1 | 1 |
| 50 | 31.006 | 30 | 1201.5 | 4 | 366.1 | 1 |
| 51 | 37.504 | 25 | 1324.3 | 4 | 366.1 | 1 |

[1223] To demonstrate the statistical significance in the peptide structure relative abundance difference between the malignant and benign pelvic tumor populations, the fold changes, p-values, and false discovery rates (FDR) are provided in Table 12. Fold-changes for individual glycopeptides were calculated on normalized relative abundances of malignant vs. benign pelvic tumor samples. False discovery rate was calculated using the Benjamini-Hochberg method.

TABLE 12
Differential marker expression analysis
for malignant vs. benign pelvic tumors

| SEQ | malignant/benign | malignant/benign | malignant/benign |
|---|---|---|---|
| ID NO | fold change | p-value | FDR |
| 35 | 0.468 | 2.04e−05 | 1.08e−02 |
| 36 | 0.676 | 4.57e−04 | 6.50e−02 |
| 37 | 0.523 | 1.11e−03 | 6.50e−02 |
| 38 | 1.392 | 2.32e−03 | 7.24e−02 |
| 39 | 1.646 | 7.94e−03 | 1.00e−01 |
| 40 | 1.413 | 9.09e−03 | 1.03e−01 |
| 41 | 0.664 | 8.97e−04 | 6.50e−02 |
| 42 | 0.691 | 4.72e−02 | 2.48e−01 |
| 43 | 1.347 | 8.58e−04 | 6.50e−02 |
| 44 | 1.815 | 2.74e−03 | 7.24e−02 |
| 45 | 0.586 | 9.58e−04 | 6.50e−02 |
| 46 | 0.702 | 1.01e−03 | 6.50e−02 |
| 47 | 0.523 | 1.11e−03 | 6.50e−02 |
| 48 | 0.734 | 1.43e−03 | 6.50e−02 |
| 49 | 0.900 | 1.47e−03 | 6.50e−02 |
| 50 | 2.432 | 2.02e−03 | 7.24e−02 |
| 51 | 1.815 | 2.74e−03 | 7.24e−02 |

[1224] The quantified abundances of various peptide structures (e.g., SEQ ID NOs: 35-42 identified in Table 9) across the entire sample set were used to train a multivariate logistic regression model to generate a disease indicator for a subject. The disease indicator was generated as a score (e.g., a probability score) in which the range in which the score falls enables diagnosis of classification as a malignant or a benign pelvic tumor state. Coefficients for the multivariate logistic models are provided in Table 13.

TABLE 13
Coefficients for each marker used in the
multivariate logistic regression models

| SEQ | Coefficients |
|---|---|
| ID NO | (Disease vs. Control) |
| 35 | −213.20 |
| 36 | −3.14 |
| 37 | −26.85 |
| 38 | 65.00 |
| 39 | 2.23 |
| 40 | 141.85 |
| 41 | −2.12 |
| 42 | −0.77 |

[1225] The relative contribution of each biomarker in this model can be correlated to the magnitude (e.g., absolute value) of each logistic regression coefficient for SEQ ID NOs: 35-42, with greater magnitudes corresponding to a greater contribution to the model's predictions. Leave one out cross-validation (LOOCV) was performed on normalized relative abundances of the biomarkers of the samples from both malignant and benign pelvic tumor patients. A logistic regression model with LASSO regularization was iteratively trained on all samples except for one sample that was left out in that iteration. The trained model was then used to predict on the sample that was left out. Table 14 provides the confusion matrix for this trained model and Table 15 provides several other performance metrics for the trained model. As shown in Table 15, the area under the receiver operating characteristic curve (AUROC) for distinguishing between the benign and malignant pelvic tumor states was found to be 1 for the training set and 0.93 for the test set. The positive predictive value (PPV) was found to be 1 for the training set and 0.75 for the test set and the negative predictive value (NPV) was found to be 1 for both of the training and test sets.

[1226] These results support the use of a model trained using the relative abundance of peptide structures for the diagnosis of malignancy for pelvic tumors and demonstrate that the glycopeptides described herein can be used to differentiate benign and malignant pelvic tumors (such as ovarian cancer) using DBS samples.

TABLE 14
Confusion matrix comparing predicted outcomes with actual
malignancy status for both training and test sets

| Predicted outcome | | |
|---|---|---|
| for train/test | True benign | True malignant |
| Benign (train) | 10 | 0 |
| Malignant (train) | 0 | 8 |
| Benign (test) | 5 | 0 |
| Malignant (test) | 0 | 3 |

TABLE 15
Performance metrics for the trained multivariate logistic
regression model for pelvic tumor malignancy diagnosis

| | AUROC | Accuracy | Sensitivity | Specificity | PPV | NPV |
|---|---|---|---|---|---|---|
| Training | 1 | 1 | 1 | 1 | 1 | 1 |
| set | | | | | | |
| Test set | 0.93 | 0.875 | 1 | 0.8 | 0.75 | 1 |

### Example 15. Digestion of Samples Prior to Enrichment and Analysis

[1227] A schematic for the overall workflow for sample preparation and analysis is given in FIG. 20 for identifying new glycoproteins and glycoforms that are suitable for use as biomarkers for diagnosing a disease.

[1228] Pooled human serum for assay normalization and calibration purposes, dithiothreitol (DTT), and iodoacetamide (IAA) were purchased from Millipore Sigma (St. Louis, MO). Sequencing grade trypsin was purchased from Promega (Madison, WI). Acetonitrile (LC-MS grade) was purchased from Honeywell (Muskegon, MI). All other reagents used were procured from Millipore Sigma, VWR, and Fisher Scientific.

[1229] In the first step described for the method of this example, ammonium bicarbonate (50 mM) and dithiothreitol (DTT, 50 mM) solutions were freshly prepared. The ammonium bicarbonate solution was used to make the DTT solution. Immediately prior to transfer, each biological sample and control was gently vortexed for 10 seconds. Using a single channel pipette, 5 μL of biological sample or control (e.g., plasma or serum) was transferred into a deep-well digestion plate, wherein the plate is compatible with thermal cycling. To this, the 35 μL of 50 mM ammonium bicarbonate solution was added. The plates were then sealed with a foil heat seal using a plate sealer. To ensure all samples were mixed thoroughly, the plates were vortexed at 1400 RPM for 1 minute on a microplate mixer, followed by centrifugation at 370×g for 1 minute.

[1230] The sample plate containing the sample was incubated in a thermal cycler for 5 minutes, wherein the thermal cycler was set to 100° C. with a lid temperature of 105° C. All heated plates were allowed to cool to room temperature before removing from the respective heat source and spinning at 370×g for 1 minute. After the spin, the plate seals were removed.

[1231] After protein denaturation, all samples were reduced by adding 20 μL of the 50 mM DTT solution into each sample and control well. The plates were then sealed with a foil heat seal using a plate sealer. To ensure all samples were mixed thoroughly, the plates were vortexed at 1400 RPM for 1 minute on a microplate mixer, followed by centrifugation at 370×g for 1 minute. Plates were then incubated in a 60° C. water bath for 50 minutes. Plates were then removed from the water bath and centrifuged at 4,800×g for 1 minute before removing the plate seals.

[1232] Prior to the completion of this reduction incubation, a fresh 90 mM iodoacetamide (IAA) solution was prepared, and the container with the IAA solution was covered in foil. When ready, samples were alkylated by adding 20 μL of the 90 mM IAA solution into each sample and control well. The plates were then sealed with a foil heat seal using a plate sealer. To ensure all samples were mixed thoroughly, the plates were vortexed at 1400 RPM for 1 minute on a microplate mixer, followed by centrifugation at 370×g for 1 minute. Plates were then incubated in the dark at room temperature for 30 minutes. After the incubation, plate seals were removed and 10 μL of the 50 mM DTT solution was added to quench any remaining IAA in solution. The plates were then sealed with a foil heat seal using a plate sealer and vortexed at 1400 RPM for 1 minute on a microplate mixer. Plates were centrifuged at 370×g for 1 minute and the plate seals were removed.

[1233] Prior to the completion of this alkylation incubation, fresh protease solutions were prepared (trypsin or trypsin/LysC combination). For example, for the trypsin solution, trypsin powder is dissolved in the 50 mM ammonium bicarbonate solution for a final concentration of 0.167 μg/μL trypsin solution. To the quenched biological samples and controls, 60 μL of the 0.167 μg/μL trypsin solution was added to each well. The plates were then sealed with a foil heat seal using a plate sealer. To ensure all samples were mixed thoroughly, the plates were vortexed at 1400 RPM for 1 minute on a microplate mixer, followed by centrifugation at 370×g for 1 minute. Plates were then incubated in a 37° C. water bath for 18 hours. Plates were then removed from the water bath and centrifuged at 4,800×g for 1 minute before removing the plate seals.

[1234] 20 μL of freshly prepared 9% formic acid solution was added to each well containing the proteolytic digested samples to stop the enzyme reaction and form the tryptically digested samples. The plates were then sealed with a foil heat seal using a plate sealer. To ensure all samples were mixed thoroughly, the plates were vortexed at 1400 RPM for 1 minute on a microplate mixer, followed by centrifugation at 370×g for 1 minute.

### Example 16. Enrichment of Proteolytic Digest Samples

[1235] Tryptically digested samples from Example 15 were enriched for glycopeptides using a hydrophilic interaction liquid chromatography (HILIC) concentration phase. The HILIC sorbent material used in this example was the Agilent GlykoPrep Cleanup (CU) Cartridges (30 μg glycan capacity) on Agilent Bravo Platform for AssayMAP (liquid handler). This enrichment process increased the proportion of glycopeptides with respect to the peptides in the sample because of the higher affinity between the glycans and the HILIC sorbent material than peptides and the HILIC sorbent material.

[1236] For 1ss samples, 170 μL of serum digest was collected and then the liquid was removed with a SpeedVac evaporator until the sample was dry (SpeedVac was set as autorun with a vacuum pressure of 5.1 mtorr and no temperature control). The 170 μL of serum digest contains 300 μg of polypeptide content (based on a literature standard value of serum protein concentration of 60 μg/μl and the initial input of 5 μl of serum to produce the digest). Next, the dry sample was reconstituted by adding 41.8 μL of deionized water to each well of a plate and then each plate was sealed with peelable foil heat seals (BioRad) using a plat sealer (BioRad PX1 PCR Plate Sealer). After sealing, the plate was sonicated for five, 5 minutes intervals where ice was added to the sonicator in between each interval to avoid a rise in temperature. The foil was removed from the plate and 178.2 μL of 1.23% trifluoracetic acid (TFA)/Acetonitrile (ACN) was added to each well of a plate and then each plate was sealed with peelable foil heat seals. After sealing, the plate was sonicated for three, 4 minutes intervals where ice was added to the sonicator in between each interval. For 2ss, a corresponding protocol was used starting with 340 μl of serum digest containing 600 μg of polypeptide content.

[1237] The plate was centrifuged at 1300 rpm at 4° C. for 1 minute. Following centrifugation, the foil was removed and 200 μL of the reconstituted solution was removed from a well and loaded onto a dry Agilent GlykoPrep Cleanup (CU) Cartridge at a 3 μL/min flow rate. The liquid output from the cartridge during the loading process was discarded. The cartridge was washed with 200 μL of a Cartridge Wash Buffer of 1% TFA, 96% ACN in deionized water at a 3 μL/min flow rate. After washing, the cartridge was eluted with 100 μL of a Cartridge Elution Buffer of 0.1% TFA in deionized water at a 3 μL/min flow rate. The elution buffer (100 μL) outputted from the cartridge was collected and then dried with a SpeedVac evaporator to form the enriched sample. The enriched samples were stored at −20° C.

### Example 17. Mass Spectrometry of Enriched Proteolytic Digests

[1238] This example demonstrates a method for mass spectrometry analysis using the enriched samples. The dried enriched samples were reconstituted with 30 μL of 0.1% formic acid in water and then vortexed.

[1239] Once a sample was reconstituted, it was directly introduced into an LC-MS system using an LC diversion technique. All samples were subjected to the same instrument method, wherein 0-3 minutes were diverted to waste, 3-47.8 minutes were passed to the MS instrument, and 47.8-49 minutes were again diverted to waste. During this time course, a constant solvent gradient was completed. The aqueous mobile phase A was 0.1% formic acid in water (vol:vol), and the organic mobile phase B was 0.1% formic acid in acetonitrile (vol:vol). Separation of peptides and glycopeptides was performed using a binary gradient of 0.0-9.0 min, 1-10% B; 9.0-36.0 min, 10-25% B; 36.0-48.0 min, 25-44% B; 48.0-48.1 min, 44-1% B; 48.1-49.0 min, 1% B. The liquid chromatography system was an Agilent 1290 Infinity II UHPLC system that used a 20 μL loop volume, 4 μL injection volume, Waters ACQUITY UPLC Peptide HSS T3 Column, 100 Å port volume, 1.8 μm particle size, 2.1 mm×150 mm (diameter×length) with HSS T3 guard column, 2.1 mm×5 mm. The output of the chromatography column was either outputted to a waste channel or to the mass spectrometer via an electrospray ionization unit using a microprocessor-controlled valve depending on the time of the chromatography run (see Table 1).

TABLE 1
Chromatography control parameters.

| Time | Scan Type | Divert vale |
|---|---|---|
| 0-3 minutes | dMRM | To waste |
| 3-47.8 minutes | dMRM | To MS |
| 47.8-49 minutes | dMRM | To waste |

[1240] FIG. 3A shows a valve position 1 where the chromatography column output goes to waste via ports 2 and 3 of the diverter valve and FIG. 3B shows a valve position 2 where the chromatography output goes to waste via ports 2 and 3 of the diverter valve. The mass spectrometry system was an Agilent 6495C triple quadrupole mass spectrometer. Samples were introduced into the mass spectrometer using an electrospray ionization (ESI) source operated in the positive ion mode. Nitrogen drying and sheath gas temperatures were set at 290° C. and 300° C., respectively. Drying and sheath gas flow rates were set at 11 L/min and 12 L/min, respectively. The nebulizer pressure was set to 30 psi. Data acquired from the UHPLC/QqQ-MS was collected using Agilent MassHunter Workstation LC/MS Data Acquisition B10.1.67. Sample analysis was performed using a dynamic multiple reaction monitoring (dMRM) method. Collision induced dissociation was used for fragmentation.

### Example 18. Mass Spectrometry of Enriched Proteolytic Digests with Varying Sample Loading

[1241] Serum samples were digested using the method of Example 15. The protein amount was varied so that either 300 μg (1ss) or 600 μg (2ss) of serum protein was enriched using the method of Example 16 to form enriched samples. 170 μl of serum digest provides the 1ss aliquot, and 340 μl of serum digest provides the 2ss aliquot. The two serum protein samples were tested with a MRM-MS method in accordance with Example 17. As illustrated in FIG. 21, the median CV values observed for the 1ss and 2ss samples were 11.4% and 8.4%, respectively. For this MRM-MS method, a panel of more than 500 glycopeptides were measured with 4 replicates. The higher 600 μg loading (2ss) was found to show an improved level of precision compared to the lower 300 μg loading (1ss). In addition, a ratio was calculated of the peak area of a glycopeptide divided by a peak area of a peptide that was attached to the same protein. As illustrated in FIG. 22, the median ratio was 30.7 and 43.5 for the 1ss and 2ss samples, respectively, indicating a significant enrichment of glycopeptides with respect to unglycosylated peptides.

### Example 19. Mass Spectrometry of Enriched Proteolytic Digests with Loading Solutions Having Different % of ACN

[1242] Serum samples were digested using the method of Example 15. In this example, the protein amount was selected to be 300 μg (1ss) serum protein. The samples were enriched in a manner similar to Example 16 where one sample was loaded onto the HILIC material with a 1% TFA, 80% ACN loading solution and the other sample was loaded onto the HILIC material with a 1% TFA, 70% ACN loading solution. The two sample types were tested in a LC-MS method in accordance with Example 17. As illustrated in FIG. 23, the median CV values observed for the 1% TFA, 80% ACN and 1% TFA, 70% ACN were 11.4% and 29.4%, respectively. The higher 80% ACN loading solution was found to show an improved level of precision compared to the lower 70% ACN loading solution.

### Example 20. Mass Spectrometry of Enriched Proteolytic Digests with and without HILIC Enrichment for Measuring a Glycopeptide

[1243] Serum samples were digested using the method of Example 15. A first and second serum protein sample of 300 μg (1ss) and 600 μg (2ss), respectively, were enriched using the method of Example 16 to form enriched samples. In this Example, a third sample was prepared with 300 μg of serum protein from Example 15, but no HILIC enrichment step was performed. The three serum protein samples were tested with a LC-MS method in accordance with Example 17. As illustrated in FIG. 24, the glycopeptide (ATL3_1330_5402-366.1000+) was measured with 4 replicates for the first and second serum sample with an average peak area of 444,797.3 (2ss) and 232,503.6 (1ss). In contrast, the glycopeptide (ATL3_1330_5402-366.1000+) was measured with 8 replicates for the third serum sample with an average peak area of 11,801.17. It should be noted that each replicate along the x-axis of FIG. 24 has a unique name for tracking purposes. The higher peak area for the first and the second serum sample showed that HILIC enrichment for a glycopeptide provided a significantly higher peak area compared to the peak area measured for the third serum sample with no HILIC enrichment. It should be noted that ATL3_1330_5402-366.1000+ represents a glycopeptide from the protein name ADAMTS-likeProtein3 (Unitprot ID P82987) where the glycan is attached at linking site position with the protein sequence of 1330. The glycopeptide ATL3_1330_5402-366.1000+ has a peptide sequence of GVPQPNITWLKR and the glycan is attached at linking site position with the peptide sequence of 6. The product ion from the glycopeptide ATL3_1330_5402-366.1000+ has a m/z ratio of 366.1. The glycopeptide ATL3_1330_5402-366.1000+ has a monoisotopic mass of 3612.571028, a collision energy of 36 V, a retention time of 21.4 minutes, and a composition of Hex(5)HexNAc(4)Fuc(0)NeuAc(2). The terms Hex, HexNAc, Fuc, and NeuAc respectively correspond to hexose, N-acetylhexosamine, fucose, and N-acetylneuraminic acid.

### Example 21. Mass Spectrometry of Enriched Proteolytic Digests with and without HILIC Enrichment for Measuring an Unglycosylated Peptide

[1244] Serum samples were digested using the method of Example 15. A first and second serum protein sample of 300 μg (1ss) and 600 μg (2ss), respectively, were enriched using the method of Example 16 to form enriched samples. In this Example, a third sample was prepared with 300 μg of serum protein from Example 15, but no HILIC enrichment step was performed. The three serum protein samples were tested with a LC-MS method in accordance with Example 17. As illustrated in FIG. 25, the unglycosylated peptide TGLQEVENVK was measured with 4 replicates for the first and second serum sample with a relatively low average peak area of 891.8 and 786.5. In contrast, the unglycosylated peptide TGLQEVENVK was measured with 8 replicates for the third serum sample with a relatively high average peak area of 178,759.7. It should be noted that each replicate along the x-axis of FIG. 25 has a unique name for tracking purposes. The higher peak area for the third serum sample showed that the HILIC enrichment did not concentrate unglycosylated peptides suggesting that glycopeptides were preferentially bound to the HILIC stationary phase with respect to unglycosylated peptides.

### Example 22. Methods of Defibrination and Digestion of Plasma Samples

[1245] A schematic for the overall workflow for defibrination of plasma samples is given in FIG. 27. Plasma samples were first dosed with defibrination reagents. Prior to treatment, each plasma sample was about 40 μL in volume. The defibrination reagents comprised CaCl₂, thrombin, Kaolin clay, and combinations thereof. CaCl₂) was added to plasma samples to yield a final concentration between 10 and 20 mM of CaCl₂), including 10 mM, 15 mM, and 20 mM. Likewise, thrombin was added to plasma samples to yield a final concentration of 5 units/mL. Kaolin clay was added to plasma samples as a dose of between 100-400 μg of Kaolin clay per sample. After the addition of defibrination agents, plasma samples were incubated at 37° C. for 30 minutes. Following incubation, the plasma samples were centrifuged at 2,000 G for 30 minutes at room temperature. The supernatant of each plasma sample was collected after centrifugation. For samples that received a dose of the Kaolin clay, the compacted clot layer was easier to visually distinguish and the supernatant was notably easier to collect. The resulting defibrinated plasma samples were then assessed via a fibrinogen ELISA assay (Example 23) or with LC-MS (Example 24) after digestion.

[1246] Prior to any LC-MS analysis, the defibrinated plasma samples were subjected to tryptic digestion. In the first step described for the tryptic digestion method herein, ammonium bicarbonate (50 mM) and dithiothreitol (DTT) (50 mM) solutions were freshly prepared. The ammonium bicarbonate solution was used to make the DTT solution. Pre-thawed biological samples and controls were inspected for turbidity, hemolysis, clotting, and precipitation. Immediately prior to transfer, each biological sample and control was gently vortexed for 10 seconds. Using a single channel pipette, 5 μL of biological sample or control (e.g., plasma or serum) was transferred into a deep-well digestion plate, wherein the plate is compatible with thermal cycling. To this, the 35 μL of 50 mM ammonium bicarbonate solution was added. The plates were then sealed with a foil heat seal using a plate sealer. To ensure all samples were mixed thoroughly, the plates were vortexed at 1400 RPM for 1 minute on a microplate mixer, followed by centrifugation at 370×g for 1 minute.

[1247] A separate sample plate was incubated in a thermal cycler for 5 minutes, wherein the thermal cycler was set to 100° C. with a lid temperature of 105° C. All heated plates were allowed to cool to room temperature before removing from the respective heat source and spinning at 370×g for 1 minute. After the spin, the plate seals were removed.

[1248] After protein denaturation, all samples were reduced by adding 20 μL of the 50 mM DTT solution into each sample and control well. The plates were then sealed with a foil heat seal using a plate sealer. To ensure all samples were mixed thoroughly, the plates were vortexed at 1400 RPM for 1 minute on a microplate mixer, followed by centrifugation at 370×g for 1 minute. Plates were then incubated in a 60° C. water bath for 50 minutes. Plates were then removed from the water bath and centrifuged at 4,800×g for 1 minute before removing the plate seals.

[1249] Prior to the completion of this reduction incubation, a fresh 90 mM iodoacetamide (IAA) solution was prepared, and the container with the IAA solution was covered in foil. When ready, samples were alkylated by adding 20 μL of the 90 mM IAA solution into each sample and control well. The plates were then sealed with a foil heat seal using a plate sealer. To ensure all samples were mixed thoroughly, the plates were vortexed at 1400 RPM for 1 minute on a microplate mixer, followed by centrifugation at 370×g for 1 minute. Plates were then incubated in the dark at room temperature for 30 minutes. After the incubation, plate seals were removed and 10 μL of the 50 mM DTT solution was added to quench any remaining IAA in solution. The plates were then sealed with a foil heat seal using a plate sealer and vortexed at 1400 RPM for 1 minute on a microplate mixer. Plates were centrifuged at 370×g for 1 minute and the plate seals were removed.

[1250] Prior to the completion of this alkylation incubation, fresh protease solutions were prepared (trypsin or trypsin/LysC combination). For example, for the trypsin solution, trypsin powder is dissolved in the 50 mM ammonium bicarbonate solution for a final concentration of 0.167 μg/μL trypsin solution. To the quenched biological samples and controls, 60 μL of the 0.167 μg/μL trypsin solution was added to each well. The plates were then sealed with a foil heat seal using a plate sealer. To ensure all samples were mixed thoroughly, the plates were vortexed at 1400 RPM for 1 minute on a microplate mixer, followed by centrifugation at 370×g for 1 minute. Plates were then incubated in a 37° C. water bath for 18 hours. Plates were then removed from the water bath and centrifuged at 4,800×g for 1 minute before removing the plate seals.

[1251] 20 μL of freshly prepared 9% formic acid solution was added to each well containing the proteolytic digested samples to stop the enzyme reaction. The plates were then sealed with a foil heat seal using a plate sealer. To ensure all samples were mixed thoroughly, the plates were vortexed at 1400 RPM for 1 minute on a microplate mixer, followed by centrifugation at 370×g for 1 minute.

### Example 23. ELISA Assays of Defibrinated Plasma Samples

[1252] Na-citrated plasma samples were defibrinated according to the defibrination procedure outlined in Example 22. Several defibrinated plasma samples were prepared according to the following formulations of defibrination reagents: (1) 10 mM CaCl₂) (Ca); (2) 15 mM CaCl₂); (3) 20 mM CaCl₂); (4) 20 mM CaCl₂) in combination with 100 μg of Kaolin clay (K); (5) 20 mM CaCl₂) in combination with 200 μg of Kaolin clay; (6) 20 mM CaCl₂) in combination with 5 units/mL thrombin (Thr); (7) 20 mM CaCl₂) in combination with 5 units/mL thrombin and 100 μg of Kaolin clay; and (8) 20 mM CaCl₂) in combination with 5 units/mL thrombin and 200 μg of Kaolin clay. Mock treated plasma and mock treated serum samples were produced by treating plasma and serum samples with deionized and filtered MilliQ water rather than being treated with any defibrination reagents to account for the volume change in comparison with treated samples.

[1253] The human fibrinogen ELISA kit used for analysis had a reported sensitivity of 29 μg/mL of fibrinogen with a range of 125-8000 μg/mL of fibrinogen. Mock treated plasma samples were diluted at a factor of 106 prior to the assay and treated plasma samples and mock treated serum samples were diluted at a factor of 2000 prior to the assay. Samples were loaded onto 96-well plates with 50 μL of sample per well and the ELISA assay was conducted to determine a concentration of fibrinogen for each sample. Mock treated plasma and mock treated serum were found to have comparable fibrinogen content as that of untreated plasma and serum samples, respectively, verifying that the experimental process does not interfere with native fibrinogen concentration. Average serum concentration of fibrinogen has been reported as 3.45 μg/mL and the reference serum concentration was determined to be around 1 μg/mL of fibrinogen. Mock treated plasma fibrinogen concentration was determined to be around 3.86 mg/mL.

[1254] The results of the human fibrinogen ELISA assay of the defibrinated plasma samples are presented in FIG. 28. The absolute concentration of fibrinogen in the treated samples can be determined via the value of each bar plot in FIG. 28 and the relative decrease in fibrinogen content compared to mock treated plasma is listed above each treated sample's respective bar plot in FIG. 28. Each of the treated samples were determined to have 3 μg/mL or less of fibrinogen content, which corresponds to 99.92-100% removal of fibrinogen compared to mock treated plasma. CaCl₂) was found to be effective at defibrination in the range of 10-20 mM. Treatment with thrombin (Thr) yielded visual clotting of the plasma samples within 1 minute after treatment at room temperature. Although each treatment removed at least 99.92% of fibrinogen when compared to mock treated plasma, a combination of more than one reagent was found to be effective treatment for fibrinogen removal.

[1255] To test the efficacy of the defibrination treatment for other types of plasma than Na-citrated plasma, the human fibrinogen ELISA assay was also conducted using Streck, EDTA, and ACD plasmas. The (A) Na-citrated, (B) Streck, (C) EDTA, and (D) ACD plasmas were each defibrinated according to the defibrination procedure outlined in Example 22. Several defibrinated plasma samples were prepared according to the following formulations of defibrination reagents: (1) 20 mM CaCl₂); (2) 20 mM CaCl₂) and 400 μg of Kaolin clay; (3) 20 mM CaCl₂ and 5 units/mL thrombin; and (4) 20 mM CaCl₂) with 5 units/mL thrombin and 400 μg of Kaolin clay. Mock treated plasma and mock treated serum were prepared as in the above Na-citrated plasma ELISA study and samples were also prepared and loaded onto 96-well plates in the same fashion. The results of the ELISA assay for multiple plasma types are presented in FIG. 29. Reference serum fibrinogen concentration for this assay was determined to be around 0.6 μg/mL. The fibrinogen concentration for each treated plasma type was determined to be under 2.5 μg/mL for each of the defibrination formulation treatments, verifying the maintained performance of the defibrination procedure for various plasma types.

### Example 24. LC-MS Analysis of Defibrinated and Digested Plasma Samples

[1256] Na-citrated plasma samples were defibrinated and digested in preparation of LC-MS analysis according to the defibrination and digestion procedures outlined in Example 22. Plasma samples were treated with CaCl₂) (C), Kaolin clay (K), thrombin (T), and combinations thereof (e.g., “C-T-K” refers to treatment with a formulation of CaCl₂, thrombin, and Kaolin clay, etc.). Four treated sample types were prepared for this study: C-T-K plasma, containing 20 mM CaCl₂, 5 units/mL thrombin, and 200 μg Kaolin clay; C-K plasma, containing 20 mM CaCl₂ and 100 μg Kaolin clay; C plasma, containing 20 mM CaCl₂); and T plasma, containing 10 units/mL thrombin. Mock treated plasma and mock treated serum samples were produced by treating plasma and serum with deionized and filtered MilliQ water rather than being treated with any defibrination reagents.

[1257] All samples were subjected to the same LC-MS instrument method, wherein 0-3 minutes were diverted to waste, 3-47.8 minutes were passed to the MS instrument, and 47.8-49 minutes were again diverted to waste. During this time course, a constant solvent gradient was completed. The aqueous mobile phase A was 0.1% formic acid in water (vol:vol), and the organic mobile phase B was 0.1% formic acid in acetonitrile (vol:vol). Separation of peptides and glycopeptides was performed using a binary gradient of 0.0-9.0 min, 1-10% B; 9.0-36.0 min, 10-25% B; 36.0-48.0 min, 25-44% B; 48.0-48.1 min, 44-1% B; 48.1-49.0 min, 1% B. The liquid chromatography system was an Agilent 1290 Infinity II UHPLC system that used a 20 μL loop volume, 4 μL injection volume, Waters ACQUITY UPLC Peptide HSS T3 Column, 100 Å port volume, 1.8 μm particle size, 2.1 mm×150 mm (diameter×length) with HSS T3 guard column, 2.1 mm×5 mm. The output of the chromatography column was either outputted to a waste channel or to the mass spectrometer via an electrospray ionization unit using a microprocessor controlled valve depending on the time of the chromatography run (see Table 1).

TABLE 1
Chromatography control parameters.

| Time | Scan Type | Divert vale |
|---|---|---|
| 0-3 minutes | dMRM | To waste |
| 3-47.8 minutes | dMRM | To MS |
| 47.8-49 minutes | dMRM | To waste |

[1258] FIG. 3A shows a valve position 1 where the chromatography column output goes to waste via ports 2 and 3 of the diverter valve and FIG. 3B shows a valve position 2 where the chromatography output goes to waste via ports 2 and 3 of the diverter valve. The mass spectrometry system was an Agilent 6495C triple quadrupole mass spectrometer. Samples were introduced into the mass spectrometer using an electrospray ionization (ESI) source operated in the positive ion mode. Nitrogen drying and sheath gas temperatures were set at 290° C. and 300° C., respectively. Drying and sheath gas flow rates were set at 11 L/min and 12 L/min, respectively. The nebulizer pressure was set to 30 psi. Data acquired from the UHPLC/QqQ-MS was collected using Agilent MassHunter Workstation LC/MS Data Acquisition B10.1.67. Sample analysis was performed using a dynamic multiple reaction monitoring (dMRM) method. Collision induced dissociation was used for fragmentation.

[1259] The average abundances of three fibrinogen peptides were calculated for each cohort of samples that received the same treatment relative to average abundance of the three fibrinogen peptides detected in mock treated plasma. The three analyzed fibrinogen peptides A, B, and G comprise the following amino acid sequences, respectively: DSHSLTTNIMEILR, EEAPSLRPAPPPISGGGYR, and YEASILTHDSSIR. The results of the LC-MS quantification of relative abundance for these three fibrinogen peptides are presented in FIG. 30. As seen in FIG. 30, treated plasma samples, serum samples, and mock serum samples all were found to have relative abundance of fibrinogen peptides around 0.015 and below compared to mock treated plasma.

[1260] To demonstrate the effect defibrination has on plasma samples, the abundance of a plurality of peptide structures was measured in the samples using LC-MS and the log₂ (abundance) for each of the plurality of peptide structures was plotted between sample treatment types. The correlation between sample treatment types of the log₂ (abundance) for the plurality of peptide structures is presented in FIGS. 8-11 for various pairs of sample treatment types. As shown in FIGS. 31A and 31B, there is a higher Pearson's R correlation and tighter clustering between C-T-K defibrinated plasma and mock treated serum (R=0.992) than between C-T-K defibrinated plasma and mock treated plasma (R=0.92). In addition, the scatterplot of the C-T-K defibrinated plasma and mock treated serum showed a slope of one whereas the scatterplot of the C-T-K defibrinated plasma and mock treated plasma showed a slope of 0.91. Accordingly, defibrinated plasma is more closely correlated with serum than plasma. A similar performance is depicted for C-K defibrinated plasma in FIG. 32 (R=0.987), C defibrinated plasma in FIG. 33 (R=0.991), and T defibrinated plasma in FIG. 34 (R=0.992) when each is plotted against mock treated serum.

### Example 25: Defibrination of Plasma Samples Using Silica

[1261] Plasma samples were first dosed with defibrination reagents. Prior to treatment, each plasma sample was about 40 μL in volume. The defibrination reagents comprised CaCl₂, thrombin, silica particles, and combinations thereof. Prior to other defibrination reagents being added to the plasma samples, silica particles were dosed into the plasma samples to yield a final concentration of 1 mg/mL. The silica particles had a particle size of less than 150 μm and a pore size of 12 nm with hexagonal pore morphology. After the addition of silica particles, samples were incubated at 37° C. for 30 minutes with mild shaking. Following the incubation with silica, samples were brought to room temperature and additional defibrination reagents were added. CaCl₂) was added to plasma samples to yield a final concentration of 20 mM of CaCl₂). Likewise, when present, thrombin was added to plasma samples to yield a final concentration of 2 units/mL. After the addition of all defibrination agents, plasma samples were incubated at 37° C. for 30 minutes. Following incubation, the plasma samples were centrifuged at 2,000 G for 30 minutes at room temperature. The supernatant of each plasma sample was collected after centrifugation. For samples that received a dose of the silica particles, the compacted clot layer was easier to visually distinguish and the supernatant was notably easier to collect. The resulting defibrinated plasma samples were then assessed via a fibrinogen ELISA assay.

[1262] Na-citrated, Streck, K2-EDTA, and ACD plasma samples were defibrinated according to the defibrination procedure outlined in this Example above. Each type of plasma received two defibrination treatments to yield two defibrinated plasma sample types: (1) 20 mM CaCl₂) in combination with 1 mg/mL silica particles; and (2) 20 mM CaCl₂) in combination with 2 units/mL thrombin and 1 mg/mL silica particles. Mock treated plasma and mock treated serum samples were produced by treating plasma and serum samples with deionized and filtered MilliQ water rather than being treated with any defibrination reagents to account for the volume change in comparison with treated samples.

[1263] The human fibrinogen ELISA kit used for analysis had a reported sensitivity of 29 μg/mL of fibrinogen with a range of 125-8000 μg/mL of fibrinogen. Mock treated plasma samples were diluted at a factor of 106 prior to the assay and treated plasma samples and mock treated serum samples were diluted at a factor of 2000 prior to the assay. Samples were loaded onto 96-well plates with 50 μL of sample per well and the ELISA assay was conducted to determine a concentration of fibrinogen for each sample. Mock treated plasma and mock treated serum were found to have comparable fibrinogen content as that of untreated plasma and serum samples, respectively, verifying that the experimental process does not interfere with native fibrinogen concentration. Average serum concentration of fibrinogen has been reported as 3.45 μg/mL and the reference serum concentration was determined to be around 1 μg/mL of fibrinogen. Mock treated plasma fibrinogen concentration was determined to be 3.203 mg/mL.

[1264] The results of the human fibrinogen ELISA assay of the defibrinated plasma samples are presented in FIG. 35. The absolute concentration in μg/mL of fibrinogen in the treated samples is provided above each bar plot in FIG. 35. A majority of the treated samples were determined to have 1.27 μg/mL or less of fibrinogen content with one outlier of 6.05 μg/mL, each of which corresponds to greater than 99% removal of fibrinogen compared to mock treated plasma.

### Example 26: Additional Methods of Defibrination of Plasma Samples

[1265] 40 μL plasma samples are obtained as described in Example 22. Plasma samples are then admixed with defibrination reagents comprising one or more monovalent cations, e.g., Na⁺ or K⁺. Specifically, the defibrination reagents include combinations of one or more monovalent cation, such as Na⁺ and/or K⁺, including at concentrations of 0.2 M-0.5 M, thrombin, Kaolin clay and/or silica particles. When relevant, thrombin is added to each plasma sample to yield a final concentration of 1 unit/mL to 10 unit/mL. When relevant, Kaolin clay is added to each plasma sample at a dose of between 100-400 μg. When relevant, silica particles are added to each plasma sample to yield a final concentration of 1 mg/mL. When relevant, the addition of silica particles is the first reagent added to the plasma sample followed by incubation at 37° C. for 30 minutes with mild shaking prior to the addition of any other defibrination reagent, as specified in Example 25. After the addition of all defibrination agents, plasma samples are incubated at 37° C. for 30 minutes. Following incubation, the plasma samples are centrifuged at 2,000 G for 30 minutes at room temperature. The supernatant of each plasma sample is collected after centrifugation. After digestion and processing (as described in Example 22), the resulting defibrinated plasma samples are then assessed via a fibrinogen ELISA assay (such as described in Examples 2 or 4) or with LC-MS (such as described in Example 24).

### Additional Exemplary Embodiments

### Section 1—Proteolytic Digestion and Liquid Chromatography-Mass Spectrometry Analysis Techniques for Samples Containing a Glycosylated Polypeptide

[1266] 1. A method for performing a liquid chromatography-mass spectrometry analysis of a proteolytic glycopeptide derived from a biological sample comprising a glycoprotein, the method comprising:
[1267] subjecting the biological sample to a thermal denaturation technique to produce a denatured sample followed by a proteolytic digestion technique to produce a proteolytically digested sample comprising the glycopeptide,
[1268] wherein the thermal denaturation technique subjects the biological sample to a thermal cycle comprising a thermal treatment of about 60° C. to about 100° C. with a hold time of at least about 1 minute,
[1269] wherein the lid temperature during the thermal cycle is at least about 2° C. higher than the temperature of the block temperature during the thermal cycle,
[1270] wherein the proteolytic digestion technique comprises adding an amount of one or more proteolytic enzymes and incubating for a digestion incubation time, and
[1271] wherein the digestion technique comprises quenching the one or more proteolytic enzymes following the digestion incubation time;
[1272] introducing the proteolytically digested sample to a liquid chromatography (LC) system of a LC-MS system; and
[1273] performing a LC separation to introduce the proteolytic glycopeptide to a mass spectrometer (MS) system,
[1274] wherein the LC separation comprises a period of diversion of an initial eluate comprising a salt, and
[1275] wherein the LC system comprises a reversed-phase chromatography column.
[1276] 2. The method of claim 1, further comprising subjecting the denatured sample to a reduction technique followed by an alkylation technique prior to the proteolytic digestion technique.
[1277] 3. The method of claim 2, wherein the reduction technique comprises subjecting the denatured sample to a reduction technique to produce a reduced sample,
[1278] wherein the reduction technique comprises adding an amount of a reducing agent to the denatured sample and incubating for a reducing incubation time.
[1279] 4. The method of claim 2 or 3, wherein the alkylation technique comprises subjecting the reduced sample to an alkylation technique to produce an alkylated sample,
[1280] wherein the alkylation technique comprises adding an amount of an alkylating agent to the reduced sample and incubating substantially in in a low light condition for an alkylation incubation time, and
[1281] wherein the alkylated technique comprises quenching the alkylating agent following the alkylation incubation time.
[1282] 5. A method for proteolytically digesting a biological sample comprising a glycoprotein to produce a proteolytic glycopeptide, the method comprising:
[1283] subjecting the biological sample to a thermal denaturation technique to produce a denatured sample,
[1284] wherein the thermal denaturation technique comprises subjecting the biological sample to a thermal cycle comprising a thermal treatment of about 60° C. to about 100° C. with a hold time of at least about 1 minute,
[1285] wherein the lid temperature during the thermal cycle is at least about 2° C. higher than the temperature of the block temperature during the thermal cycle;
[1286] subjecting the denatured sample to a reduction technique to produce a reduced sample,
[1287] wherein the reduction technique comprises adding an amount of a reducing agent to the denatured sample and incubating for a reducing incubation time;
[1288] subjecting the reduced sample to an alkylation technique to produce an alkylated sample,
[1289] wherein the alkylation technique comprises adding an amount of an alkylating agent to the reduced sample and incubating substantially in the dark or in a low light condition for an alkylation incubation time, and
[1290] wherein the alkylated technique comprises quenching the alkylating agent following the alkylation incubation time; and
[1291] subjecting the alkylated sample to a proteolytic digestion technique to produce a proteolytically digested sample comprising the proteolytic glycopeptide,
[1292] wherein the proteolytic digestion technique comprises adding an amount of one or more proteolytic enzymes and incubating for a digestion incubation time, and
[1293] wherein the proteolytic digestion technique comprises quenching the one or more proteolytic enzymes following the digestion incubation time.
[1294] 6. The method of any one of claims 1-5, wherein the glycopeptide comprises a hydrophilic glycan portion.
[1295] 7. The method of any one of claims 1-5, wherein the glycopeptide comprises a hydrophobic glycan portion.
[1296] 8. The method of any one of claims 1-7, wherein the biological sample is derived from a human.
[1297] 9. The method of any one of claims 1-8, wherein the biological sample is a blood sample or a derivative thereof.
[1298] 10. The method of any one of claims 1-9, wherein the biological sample is a plasma sample.
[1299] 11. The method of any one of claims 1-10, wherein the biological sample is a serum sample.
[1300] 12. The method of any one of claims 1-11, wherein the biological sample is not subjected to a high-abundant protein depletion technique prior to the thermal denaturation technique.
[1301] 13. The method of any one of claims 1-12, wherein the thermal cycle comprises a block set temperature of about 60° C. to about 100° C. with a hold time of at least about 1 minute.
[1302] 14. The method of any one of claims 1-13, wherein the thermal cycle comprises a block ending temperature of about 15° C. to about 40° C.
[1303] 15. The method of any one of claims 1-14, wherein the thermal cycle comprises a block starting temperature of about 15° C. to about 50° C.
[1304] 16. The method of any one of claims 1-15, wherein the thermal cycle is performed in a thermal cycler comprising a lid temperature control element.
[1305] 17. The method of any one of claims 1-16, wherein the thermal cycle comprises a ramp rate between the block set temperature and the block ending temperature of about 1° C./second to about 10° C./second.
[1306] 18. The method of any one of claims 1-17, wherein the proteolytic digestion technique is performed at a temperature of about 20° C. to about 55° C.
[1307] 19. The method of any one of claims 1-18, wherein the digestion incubation time is at least about 20 minutes.
[1308] 20. The method of any one of claims 1-19, wherein the proteolytic digestion technique is performed at a temperature of about 37° C. for at least about 12 hours.
[1309] 21. The method of any one of claims 18-20, wherein the proteolytic digestion technique is performed using a second thermal cycle, wherein the lid temperature during the second thermal cycle is at least about 2° C. higher than the temperature of the block temperature during the second thermal cycle.
[1310] 22. The method of claim 21, wherein the second thermal cycle is performed in a thermal cycler comprising a lid temperature control element.
[1311] 23. The method of any one of claims 1-22, wherein each of the one or more proteolytic enzymes is selected from the group consisting of trypsin and LysC.
[1312] 24. The method of claim 23, wherein the trypsin is methylated and/or acetylated.
[1313] 25. The method of any one of claims 1-23, wherein the amount of the one or more proteolytic enzymes is in a proteolytic enzyme concentration to sample protein weight ratio of about 1:20 to about 1:40.
[1314] 26. The method of any one of claims 1-25, wherein quenching the one or more proteolytic enzymes is performed using an acid.
[1315] 27. The method of any one of claims 1-26, wherein the acid is formic acid (FA) or trifluoroacetic acid (TFA), or a mixture thereof.
[1316] 28. The method of any one of claims 2-27, wherein the reduction technique is performed at a temperature of about 35° C. to about 70° C.
[1317] 29. The method of any one of claims 2-28, wherein the reduction incubation time is at least about 20 minutes.
[1318] 30. The method of any one of claims 2-29, wherein the reduction technique is performed at a temperature of about 60° C. for at least about 50 minutes.
[1319] 31. The method of any one of claims 2-30, wherein the reduction technique is performed using a third thermal cycle, wherein the lid temperature during the third thermal cycle is at least about 2° C. higher than the temperature of the block temperature during the third thermal cycle.
[1320] 32. The method of claim 31, wherein the third thermal cycle is performed in a thermal cycler comprising a lid temperature control element.
[1321] 33. The method of any one of claims 1-22, wherein the reducing agent is dithiothreitol (DTT) or tris(2-carboxyethyl) phosphine (TCEP).
[1322] 34. The method of claim 33, wherein DTT is added in an amount of about 10 mM to about 100 mM.
[1323] 35. The method of any one of claims 2-34, wherein the alkylation technique is performed at a temperature of about 20° C. to about 37° C.
[1324] 36. The method of any one of claims 2-35, wherein the alkylation incubation time is at least about 5 minutes.
[1325] 37. The method of any one of claims 2-36, wherein the alkylation technique is performed at a temperature of about 20° C. to about 25° C. for at least about 30 minutes.
[1326] 38 The method of any one of claims 2-37, wherein the alkylating agent is iodoacetamide (IAA).
[1327] 39. The method of claim 38, wherein IAA is added in an amount of about 10 mM to about 200 mM.
[1328] 40. The method of any one of claims 4-39, wherein quenching the alkylating agent comprises use of a neutralizing agent.
[1329] 41. The method of claim 40, wherein the neutralizing agent is DTT.
[1330] 42. The method of any one of claims 1-4 and 6-41, wherein the proteolytically digested sample is introduced to the LC-MS system without performing an offline desalting technique.
[1331] 43. The method of any one of claims 1-4 and 6-42, wherein the period of diversion of the LC separation technique comprises about 1 to about 5 column volumes of the initial eluate that are diverted to waste.
[1332] 44. The method of any one of claims 1-4, and 6-43, wherein the LC-MS technique is a high pressure LC-MS technique.
[1333] 45. The method of any one of claims 1-4 and 6-43, wherein the LC-MS technique comprises multiple reaction monitoring.
[1334] 46. The method of any one of claims 1-4 and 6-45, further comprising adding a standard to the proteolytically digested sample prior to the LC-MS technique.
[1335] 47. The method of claim 46, wherein the standard is a stable isotope-internal standard (SI-IS) peptide mixture.
[1336] 48. The method of any one of claims 1-47, wherein the biological sample is admixed with a buffer prior to the thermal denaturation technique.
[1337] 49. The method of claim 48, wherein the buffer is ammonium bicarbonate.
[1338] 50. The method of any one of claims 1-49, wherein the proteolytic glycopeptide comprises one or more sialic acid groups.
[1339] 51. The method of any one of claims 33-50, wherein the proteolytically digested sample introduced to the liquid chromatography (LC) system comprises one or more of the DTT, the IAA, the iodide, and a disulfide bonded 6-membered ring, wherein the disulfide bonded 6-membered ring is a byproduct of DTT.

### Section 2—Reversed-Phase Proteolytic Digestion Clean-Up Techniques for Samples Containing a Glycosylated Polypeptide

[1340] 1. A method for processing a proteolytically digested sample to produce a processed sample suitable for use in a liquid chromatography-mass spectrometry (LC-MS) analysis,
[1341] wherein the proteolytically digested sample comprises a plurality of proteolytic polypeptides comprising at least one proteolytic glycopeptide,
[1342] the method comprising:
[1343] performing one or more of the following:
[1344] (a) subjecting the proteolytically digested sample to a solid phase extraction column comprising a reversed-phase medium according to one or more conditions to associate at least a portion of the plurality of proteolytic polypeptides with the reversed-phase medium, the one or more conditions comprising:
[1345] (i) a polypeptide loading amount of about 50% or less of a binding capacity of the reversed-phase medium,
[1346] wherein the binding capacity of the reversed-phase medium is based on an insulin load having 10% or less breakthrough; or
[1347] (ii) a polypeptide loading concentration of about 0.6 μg/μL or less; or
[1348] (b) subjecting the reversed-phase medium comprising the associated proteolytic polypeptides to a wash buffer at a wash flow rate of about 0.1 column volumes/minute to about 2 column volumes/minute; and
[1349] subjecting the reversed-phase medium comprising the associated proteolytic polypeptides to an elution buffer to produce the processed sample.
[1350] 2. The method of claim 1, wherein the one or more conditions comprises the polypeptide loading amount of about 50% or less of the binding capacity of the reversed-phase medium.
[1351] 3 The method of claim 1 or 2, wherein the one or more conditions comprises the polypeptide loading concentration of about 0.6 μg/μL or less.
[1352] 4. The method of any one of claim 1-3, wherein the performing comprises the subjecting the reversed-phase medium comprising the associated proteolytic polypeptides to the wash flow rate of about 0.1 column volumes/minute to about 2 column volumes/minute.
[1353] 5. The method of any one of claims 1-4, wherein the column comprising the reversed-phase material has a medium volume of about 1 to about 10 μL.
[1354] 6. The method of any one of claims 1-5, wherein the polypeptide loading amount is about 30 μg to about 200 μg.
[1355] 7. The method of any one of claims 1-6, wherein the polypeptide loading amount is contained in a solution volume of at least about 100 μL.
[1356] 8. The method of any one of claims 1-7, wherein the wash flow rate ranges from about 0.5 μL/minutes to about 10 μL/minute.
[1357] 9. The method of any one of claims 1-8, wherein the reversed-phase medium comprises an alkyl-based moiety covalently bound to a solid phase.
[1358] 10. The method of claim 9, wherein the alkyl-based moiety comprises an octadecyl carbon functional group (C18) covalently bound to the solid phase.
[1359] 11. The method of claim 9, wherein the alkyl-based moiety comprises an octa carbon functional group (C8) covalently bound to the solid phase.
[1360] 12. The method of claim 9, wherein the carbon alkyl-based moiety comprises a tetra carbon functional group (C4) covalently bound to the solid phase.
[1361] 13. The method of any one of claims 9-12, wherein the solid phase comprises a silica material.
[1362] 14. The method of any one of claims 1-8, wherein the reversed-phase medium comprises a hydrophobic polymer material.
[1363] 15. The method of claim 14, wherein the hydrophobic polymer material comprises a phenyl moiety.
[1364] 16. The method of claim 15, wherein the hydrophobic polymer material comprises a reaction product of divinylbenzene.
[1365] 17. The method of claim 16, wherein the hydrophobic polymer material comprises poly(styrene-co-divinylbenzene).
[1366] 18. The method of any one of claims 1-17, further comprising subjecting the reversed-phase medium comprising the associated proteolytic polypeptides to a wash buffer prior to subjecting the reversed-phase medium to the elution buffer.
[1367] 19. The method of any one of claims 1-18, further comprising subjecting the processed sample comprising the elution buffer to a drying technique to produce a dried sample.
[1368] 20. The method of any one of claims 1-19, further comprising reconstituting the dried sample to produce a reconstituted sample and inputting the reconstituted sample into a LC chromatography system of a LC-MS system to obtain mass spectrometry data.
[1369] 21. The method of claim 20, further comprising identifying a polypeptide sequence of a glycopeptide from the mass spectrometry data.
[1370] 22. The method of claim 21, further comprising identifying a glycan attachment site of the glycopeptide from the mass spectrometry data.
[1371] 23. The method of claim 21 or 22, further comprising identifying a glycan structure of the glycopeptide from the mass spectrometry data.
[1372] 24. The method of any one of claims 1-23, wherein the at least one glycopeptide comprises a glycan structure comprising one or more sialic acid moieties.
[1373] 25. The method of any one of claims 1-24, wherein the proteolytically digested sample is obtained from a method for proteolytically digesting a biological sample comprising a glycoprotein.

### Section 3—Absorbent or Bibulous Members Having a Polypeptide Standard and Configured for Deposition of a Blood Sample and LC-MS Analysis of Glycopeptides Therefrom

[1374] 1. A method for performing a liquid chromatography-mass spectrometry (LC-MS) analysis of a proteolytic glycopeptide derived from a blood sample deposited on a delimited zone of an absorbent or bibulous member
[1375] wherein the blood sample comprises a plurality of polypeptides comprising at least one glycoprotein,
[1376] the method comprising:
[1377] extracting at least a portion of the plurality of polypeptides and one or more extraction internal standards from the absorbent or bibulous member to obtain an extracted sample,
[1378] wherein the absorbent or bibulous member comprises the one or more extraction internal standards prior to deposition of the blood sample within the delimited zone, and
[1379] wherein at least one of the one or more extraction internal standards comprises a polypeptide standard;
[1380] subjecting the extracted sample or a derivative thereof to a proteolytic digestion technique to produce a proteolytically digested sample comprising the proteolytic glycopeptide;
[1381] introducing at least a portion of the proteolytically digested sample to a liquid chromatography (LC) system of a LC-MS system; and
[1382] performing the LC-MS analysis on at least the proteolytic glycopeptide and the one or more extraction internal standards.
[1383] 2. The method of claim 1, wherein the performing the LC-MS analysis comprises measuring an abundance signal for the proteolytic glycopeptide and an abundance signal for the one or more extraction internal standards.
[1384] 3. The method of claim 2, wherein the performing the LC-MS analysis further comprises calculating a concentration of the proteolytic glycopeptide based on a concentration of the one or more extraction internal standards prior to deposition on the absorbent or bibulous member, the abundance signal for the proteolytic glycopeptide, and the abundance signal for the one or more extraction internal standards.
[1385] 4. The method of claim 1, wherein the absorbent or bibulous member is a dried blood spot card.
[1386] 5. The method of any one of claims 1-4, further comprising determining an extraction efficiency based on the LC-MS analysis of at least one of the one or more extraction internal standards.
[1387] 6. The method of any one of claims 1-5, further comprising determining a digestion efficiency based on the LC-MS analysis of at least one of the one or more extraction internal standards.
[1388] 7. The method of any one of claims 1-6, further comprising assessing a sample migration pattern based on the LC-MS analysis of at least one of the one or more extraction internal standards.
[1389] 8. The method of any one of claims 1-7, wherein the one or more extraction internal standards comprise a plurality of polypeptide standards, and wherein at least two of the plurality of polypeptide standards have different amino acid lengths.
[1390] 9. The method of claim 8, wherein the amino acid lengths of the plurality of polypeptide standards of the one or more extraction internal standards range from 4 amino acid to 1500 amino acids.
[1391] 10. The method of any one of claims 1-9, wherein the at least one polypeptide standard of the one or more extraction internal standards comprises at least one internal enzymatic cleavage site.
[1392] 11. The method of any one of claims 1-10, wherein the one or more extraction internal standards comprise a plurality of polypeptide standards, wherein at least two of the plurality of polypeptide standards have different net hydrophobicities as based on a computation tool or partition coefficient analysis.
[1393] 12. The method of claim 11, wherein the plurality of polypeptide standards having different net hydrophobicities comprises a hydrophobicity range of about −0.5 to about 1 according to the Grand average of hydropathicity index (GRAVY).
[1394] 13. The method of any one of claims 1-12, wherein the at least one polypeptide standard of the one or more extraction internal standards comprises a C-terminal arginine or lysine.
[1395] 14. The method of any one of claims 1-13, wherein the at least one polypeptide standard of the one or more extraction internal standards comprises an amino acid sequence that does not have homology to a peptide derived from the human proteome.
[1396] 15. The method of any one of claims 1-14, wherein the at least one polypeptide standard of the one or more extraction internal standards is a synthetic polypeptide.
[1397] 16. The method of any one of claims 1-15, wherein the at least one polypeptide standard of the one or more extraction internal standards comprises a stable heavy isotope label.
[1398] 17. The method of any one of claims 1-16, wherein the at least one polypeptide standard of the one or more extraction internal standards comprises a sequence that is non-homologous to an endogenous polypeptide of an individual from which the blood sample originates.
[1399] 18. The method of any one of claims 1-17, wherein the at least one polypeptide standard of the one or more extraction internal standards is an analog of an endogenous polypeptide of an individual from which the blood sample originates.
[1400] 19. The method of claim 18, wherein the analog is a stable heavy isotope labeled analog.
[1401] 20 The method of any one of claims 1-19, wherein the at least one polypeptide standard of the one or more extraction internal standards is a recombinantly expressed polypeptide.
[1402] 21. The method of any one of claims 1-20, wherein the at least one polypeptide standard of the one or more extraction internal standards is a glycopolypeptide.
[1403] 22. The method of any one of claims 1-21, wherein the at least one polypeptide standard of the one or more extraction internal standards is a polypeptide that does not substantially interact with hemoglobin.
[1404] 23. The method of any one of claims 1-22, wherein the at least one polypeptide standard of the one or more extraction internal standards comprises at least a contiguous 4 amino acid sequence from SEQ ID NOS: 14-20.
[1405] 24. The method of any one of claims 1-23, wherein the at least one polypeptide standard of the one or more extraction internal standards comprises a sequence is selected from the group consisting of SEQ ID NOS: 21-22.
[1406] 25. The method of any one of claims 1-24, wherein the absorbent or bibulous member comprises a known amount of each of the one or more extraction internal standards.
[1407] 26. The method of claim 26, wherein the known amount of each of the one or more extraction internal standards is about 0.05 ppm to about 5 ppm.
[1408] 27. The method of any one of claims 1-27, wherein the one or more extraction internal standards are deposited and dried on the absorbent or bibulous member within an area having a surface area of about 1,000 mm² or less.
[1409] 28. The method of claim 27, wherein the one or more extraction internal standard are deposited and dried on the absorbent or bibulous member within the delimited zone.
[1410] 29. The method of any one of claims 1-28, wherein the extracting the at least the portion of the plurality of polypeptides and the one or more extraction internal standards from the absorbent or bibulous member comprises:
[1411] separating one or more portions of the absorbent or bibulous member from the absorbent or bibulous member,
[1412] wherein the one or more portions of the absorbent or bibulous member comprise at least a portion of the blood sample and the one or more extraction internal standards;
[1413] extracting at least the portion of the plurality of polypeptides and the one or more extraction internal standards from the one or more portions of the absorbent or bibulous member into an extraction solution; and
[1414] precipitating at least the portion of the plurality of polypeptides and the one or more extraction internal standards to obtain the extracted sample.
[1415] 30. The method of claim 29, wherein the separating the one or more portions of the absorbent or bibulous member comprises punching the one or more portion of the absorbent or bibulous member using a punching device.
[1416] 31. The method of claim 29 or 30, wherein each of the one or more portions separated from the absorbent or bibulous member have a surface area of about 2 mm² to about 100 mm².
[1417] 32. The method of any one of claims 29-31, wherein the precipitating at least the portion of the plurality of polypeptides and the one or more extraction internal standards comprises subjecting the at least the portion of the plurality of polypeptides and the one or more extraction internal standards to ethanol.
[1418] 33. The method of any one of claims 1-32, further comprising adding a solution to the extracted sample to resolubilize polypeptide content therein prior to subjecting the extracted sample or the derivative thereof to the proteolytic digestion technique.
[1419] 34. The method of any one of claims 1-33, wherein the proteolytic digestion technique comprises a thermal denaturation technique.
[1420] 35. The method of claim 34, wherein the proteolytic digestion technique further comprises a reduction technique and an alkylation technique.
[1421] 36. The method of claim 34 or 35, wherein the proteolytic digestion technique comprises the use of one or more proteases.
[1422] 37 The method of claim 36, wherein the protease is trypsin.
[1423] 38. The method of any one of claims 1-32, further comprising adding one or more quantification internal standards after subjecting the extracted sample or the derivative thereof to a proteolytic digestion technique and prior to introducing at least the portion of the proteolytically digested sample to the liquid chromatography LC system of the LC-MS system.
[1424] 39. The method of any one of claims 1-38, wherein the LC-MS analysis comprises a multiple-reaction-monitoring (MRM) technique targeting the proteolytic glycopeptide and the one or more extraction internal standards.
[1425] 40. The method of claim 38 or 39, wherein the LC-MS analysis comprises a multiple-reaction-monitoring (MRM) technique targeting the one or more quantification internal standards.
[1426] 41. The method of any one of claims 1-40, wherein the absorbent or bibulous member comprises a delimited zone having a surface area of about 1,000 mm² or less.
[1427] 42. The method of any one of claims 1-41, wherein the absorbent or bibulous member comprises a filter paper material.
[1428] 43. The method of claim 42, wherein the filter paper material comprises a cellulose-based paper.
[1429] 44. The method of claim 42 or 43, wherein the filter paper material prevents or reduces sample hemolysis.
[1430] 45. The method of any one of claims 1-44, wherein the absorbent or bibulous member comprises a lateral flow material configured to separate whole blood into a portion of plasma, wherein the whole blood is deposited at the delimited zone and then a liquid portion of the whole blood laterally flows from the delimited zone to a distal zone, wherein the distal zone contains the portion of the plasma.
[1431] 46. An absorbent or bibulous member comprising one or more extraction internal standard deposited thereon on a delimited zone, wherein the one or more extraction internal standards comprises at least one polypeptide standard, and wherein the absorbent or bibulous member does not comprise a blood sample deposited thereon.
[1432] 47. The absorbent or bibulous member of claim 46, wherein the absorbent or bibulous member is a blood spot card.

### Section 4—Method of Diagnosing Pelvic Tumors

[1433] 1. A method of classifying a biological sample obtained from a subject with respect to a plurality of states associated with a pelvic cancer, the method comprising
[1434] receiving peptide structure data corresponding to a set of glycoproteins in the biological sample;
[1435] inputting quantification data identified from the peptide structure data for a set of peptide structures into a machine-learning model trained to identify a disease indicator based on the quantification data, wherein the set of peptide structures comprises at least one peptide structure identified from a plurality of peptide structures in Table 9;
[1436] identifying, by the machine-learning model, the disease indicator; and classifying the biological sample with respect to a plurality of states associated with pelvic cancer based upon the identified disease indicator.
[1437] 2. A method of detecting the presence of one of a plurality of states associated with a pelvic cancer in a subject, the method comprising
[1438] receiving peptide structure data corresponding to a set of glycoproteins in a biological sample obtained from a subject, wherein the peptide structure data comprises at least one peptide structure from Table 9;
[1439] inputting quantification data identified from the peptide structure data for a set of peptide structures into a machine-learning model trained to identify a disease indicator based on the quantification data; and
[1440] detecting the presence of a corresponding state of the plurality of states associated with the pelvic cancer in response to a determination that the identified disease indicator falls within a selected range associated with the corresponding state.
[1441] 3 The method of claim 1 or 2, wherein the plurality of states comprises at least one of a malignant tumor or a benign tumor.
[1442] 4. The method of anyone of claims 1-3, wherein the machine-learning model comprises a logistic regression model.
[1443] 5. The method of any one of claims 1-4, further comprising administering to the subject an effective amount of an agent to treat the pelvic tumor.
[1444] 6. The method of any one of claims 1-5, wherein the pelvic tumor is ovarian cancer.
[1445] 7. A method of treating a pelvic tumor in a subject comprising
[1446] receiving peptide structure data corresponding to a set of glycoproteins in a biological sample obtained from a subject, wherein the peptide structure data comprises at least one peptide structure from Table 9;
[1447] inputting quantification data for the at least one peptide structure into a machine-learning model trained to generate a risk score based on the quantification data;
[1448] outputting, by the machine-learning model, the quantification data using the machine learning model to generate a risk score,
[1449] administering an effective amount of an agent to treat the pelvic cancer based upon the risk score.
[1450] 8. A method of determining a diagnosis for a pelvic tumor in a subject comprising
[1451] receiving peptide structure data corresponding to a set of glycoproteins in a biological sample;
[1452] inputting quantification data identified from the peptide structure data for a set of peptide structures into a machine-learning model trained to identify a disease indicator based on the quantification data, wherein the set of peptide structure data comprises at least one peptide structure identified from a plurality of peptide structures in Table 9;
[1453] identifying, by the machine-learning model, the disease indicator; and
[1454] determining a diagnosis for the pelvic tumor based upon the identified disease indicator.
[1455] 9. The method of claim 8, wherein the diagnosis is the presence of a malignant tumor or a benign tumor.
[1456] 10. A method of treating a pelvic tumor in a subject comprising
[1457] receiving peptide structure data corresponding to a set of glycoproteins in a biological sample;
[1458] inputting quantification data identified from the peptide structure data for a set of peptide structures into a machine-learning model trained to identify a disease indicator based on the quantification data, wherein the peptide structure data comprises at least one peptide structure identified from a plurality of peptide structures in Table 9;
[1459] identifying, by the machine-learning model, the disease indicator;
[1460] determining a risk score the identified disease indicator; and
[1461] administering an effective amount of an agent to treat the pelvic tumor based upon the risk score.
[1462] 11. A method of treating a pelvic tumor in an individual comprising detecting the presence or amount of at least one peptide structure, wherein the at least one peptide structure comprises at least one peptide structure from Table 9, and administering an effective amount of an agent to treat the pelvic tumor based upon the presence or amount of the peptide structure.
[1463] 12. A method of diagnosing an individual with a benign or malignant pelvic tumor comprising detecting a presence or amount of at least one peptide structure, wherein the at least one peptide structure comprises at least one peptide structure from Table 9, and diagnosing the individual with a benign or malignant pelvic tumor based upon the presence or amount of the at least one peptide structure.
[1464] 13. A method of diagnosing an individual with a pelvic tumor comprising
[1465] detecting the presence or amount of at least one peptide structure from Table 9;
[1466] inputting a quantification of the detected at least one peptide structure into a machine-learning model trained to generate a class label,
[1467] determining if the class label is above or below a threshold for a classification;
[1468] identifying a diagnostic classification for the individual based on whether the class label is above or below a threshold for the classification; and
[1469] diagnosing the individual as having a benign or malignant pelvic tumor on the diagnostic classification.
[1470] 14. The method of any one of claims 1-10, further comprising detecting the presence or amount of at least one peptide structure from Table 9.
[1471] 15. The method of any one of claims 11-14, wherein the presence or amount of the at least one peptide structure is detected using mass spectrometry or ELISA.
[1472] 16. The method of claim 15, wherein the presence or amount of the at least one peptide structure is detected using MRM mass spectrometry.
[1473] 17. The method of any one of claims 11-16, wherein the amount of at least one peptide structure is none, or below a detection limit.
[1474] 18. The method of any one of claims 1-17, wherein the at least one peptide structure comprises two or more peptide structures identified in Table 9, three or more peptides structures identified in Table 9, four or more peptide structure identified in Table 9, five or more peptide structures identified in Table 9, six or more peptide structures identified in Table 9, seven or more peptide structures identified in Table 9, or eight or more peptide structure identified in Table 9.
[1475] 19. The method of any one of claims 1-18 wherein the at least one peptide structure comprises the sequence set forth in SEQ ID NOs: 35-51.
[1476] 20. The method of any one of claims 1-19, wherein the at least one peptide structure comprises the sequence set forth in SEQ ID NOs: 35-42.
[1477] 21. The method of any one of claims 1-19, wherein the at least one peptide structure comprises the sequence set forth in SEQ ID NOs: 43-51.
[1478] 22. The method of any one of claims 1-19, wherein the at least one peptide structure comprises the sequence set forth in SEQ ID NOs: 35-40.
[1479] 23. The method of any one of claims 1-22, wherein the biological sample is a blood sample, a serum sample, or tumor tissue.
[1480] 24. The method of claim 23, wherein the biological sample is the blood sample, wherein the blood sample is deposited on a delimited zone of an absorbent or bibulous member comprising a plurality of polypeptides comprising at least one glycoprotein.
[1481] 25. The method of claim 24 further comprising
[1482] extracting at least a portion of the plurality of polypeptides and one or more extraction internal standards from the absorbent or bibulous member to obtain an extracted sample,
[1483] wherein the absorbent or bibulous member comprises the one or more extraction internal standards prior to deposition of the blood sample within the delimited zone, and
[1484] wherein at least one of the one or more extraction internal standards comprises a polypeptide standard;
[1485] subjecting the extracted sample or a derivative thereof to a proteolytic digestion technique to produce a proteolytically digested sample comprising the proteolytic glycopeptide;
[1486] introducing at least a portion of the proteolytically digested sample to a liquid chromatography (LC) system of a LC-MS system; and
[1487] performing the LC-MS analysis on at least the proteolytic glycopeptide and the one or more extraction internal standards, wherein the at least one proteolytic glycopeptide comprises at least one peptide structure set forth in Table 9.
[1488] 26. A method for performing a liquid chromatography-mass spectrometry (LC-MS) analysis of a proteolytic glycopeptide derived from a blood sample from an individual deposited on a delimited zone of a blood spot card, the method comprising
[1489] obtaining a blood spot card comprising a blood sample from the individual deposited thereon, wherein the blood spot card comprises one or more extraction internal standards deposited and dried prior to deposition of the blood sample on the blood spot card, and
[1490] wherein the blood spot card comprising the blood sample contains at least a portion of the blood sample and the one or more extraction internal standards in an overlapping area of the blood spot card;
[1491] extracting at least a portion of the plurality of polypeptides and the one or more extraction internal standards from the blood spot card to obtain an extracted sample;
[1492] subjecting the extracted sample or a derivative thereof to a proteolytic digestion technique to produce a proteolytically digested sample comprising the proteolytic glycopeptide;
[1493] introducing at least a portion of the proteolytically digested sample to a liquid chromatography (LC) system of a LC-MS system; and
[1494] performing an LC-MS analysis to quantify one or more biomarkers of ovarian cancer and the one or more extraction internal standards,
[1495] wherein the one or more biomarkers comprise a polypeptide comprising a sequence of any of SEQ ID NOs: 35-51, and
[1496] wherein at least one of the one or more biomarkers is a glycopeptide.
[1497] 27. The method of claim 25 or 26, wherein the at least one polypeptide standard of the one or more extraction internal standards comprises at least a contiguous 4 amino acid sequence from SEQ ID NOs: 14-20.
[1498] 28. The method of any one of claims 25-27, wherein the at least one polypeptide standard of the one or more extraction internal standards comprises a sequence is selected from the group consisting of SEQ ID NOs: 21-22.
[1499] 29. The method of any one of claims 25-28, wherein the absorbent or bibulous member comprises a known amount of each of the one or more extraction internal standards.
[1500] 30. The method of any one of claims 25-29, wherein extracting the at least the portion of the plurality of polypeptides and the one or more extraction internal standards from the absorbent or bibulous member comprises:
[1501] separating one or more portions of the absorbent or bibulous member from the absorbent or bibulous member,
[1502] wherein the one or more portions of the absorbent or bibulous member comprise at least a portion of the blood sample and the one or more extraction internal standards;
[1503] extracting at least the portion of the plurality of polypeptides and the one or more extraction internal standards from the one or more portions of the absorbent or bibulous member into an extraction solution; and
[1504] precipitating at least the portion of the plurality of polypeptides and the one or more extraction internal standards to obtain the extracted sample.
[1505] 31. The method of claim 30, wherein the precipitating at least the portion of the plurality of polypeptides and the one or more extraction internal standards comprises subjecting at least the portion of the plurality of polypeptides and the one or more extraction internal standards to ethanol.
[1506] 32. The method of any one of claims 25-31, further comprising adding a solution to the extracted sample to resolubilize polypeptide content therein prior to subjecting the extracted sample or the derivative thereof to the proteolytic digestion technique.
[1507] 33. The method of any one of claims 25-32, wherein the proteolytic digestion technique comprises a thermal denaturation technique.
[1508] 34. The method of claim 33, wherein the proteolytic digestion technique further comprises a reduction technique and an alkylation technique.
[1509] 35. The method of claim 33 or 34, wherein the proteolytic digestion technique comprises the use of one or more proteases.
[1510] 36. The method of claim 35, wherein the protease is trypsin.
[1511] 37. The method of any one of claims 1-36, wherein the absorbent or bibulous member comprises a filter paper material.
[1512] 38. The method of claim 37, wherein the filter paper material comprises a cellulose-based paper.
[1513] 39. The method of claim 37 or 38, wherein the filter paper material prevents or reduces sample hemolysis.
[1514] 40. The method of any one of claims 1-39, wherein the absorbent or bibulous member comprises a lateral flow material configured to separate whole blood into a portion of plasma, wherein the whole blood is deposited at the delimited zone and then a liquid portion of the whole blood laterally flows from the delimited zone to a distal zone, wherein the distal zone contains the portion of the plasma.
[1515] 41. A method of training a model to diagnose a subject with one of a plurality of states associated with a pelvic tumor, the method comprising
[1516] receiving quantification data for a panel of peptide structures for a plurality of subjects diagnosed with the plurality of states associated with a pelvic tumor
[1517] wherein the panel of peptide structures comprises at least one peptide structure set forth in Table 9; and
[1518] training a machine-learning model to determine a state of the plurality of states a biological sample from the subject based on the quantification data.
[1519] 42. The method of claims 1-10 and 41, wherein the quantification data comprises at least one of an abundance, a relative abundance, a normalized abundance, a relative quantity, an adjusted quantity, a normalized quantity, a relative concentration, an adjusted concentration, or a normalized concentration.
[1520] 43. The method of claim 41 or claim 42, wherein the machine-learning model is trained using random forest or logical progression training methods.
[1521] 44. The method of any one of claims 41-43, wherein training the machine-learning model to determine the state of the plurality of states comprises training the machine-learning model to generate a class label for the state of the plurality of states.
[1522] 45. The method of any one of claims 41-44 wherein the machine-learning model comprises a logistic regression model.
[1523] 46. The method of any one of claims 1-26 and 41-45, wherein at least one of the peptide structures comprises a glycopeptide.
[1524] 47. A composition comprising one or more peptide structures from Table 9.
[1525] 48. A composition comprising one or more peptides comprising the sequence set forth in SEQ ID NOs: 35-51.

### Section 5—HILIC Enrichment Sample Preparation for Quantitative Mass Spectrometry

[1526] 1. A method for processing a proteolytic digest sample for use in a liquid chromatography-mass spectrometry (LC-MS) analysis,
[1527] wherein the proteolytic digest sample comprises a plurality of proteolytically digested peptides comprising at least one proteolytically digested glycopeptide,
[1528] the method comprising:
[1529] (A) loading a hydrophilic interaction liquid chromatography (HILIC) load derived from the proteolytic digest sample to a solid phase extraction column comprising a HILIC medium according to one or more conditions to associate the at least one proteolytically digested glycopeptide with the HILIC medium, the one or more conditions comprising:
[1530] (1) the loading of the HILIC load to the solid phase extraction column is initiated when the HILIC medium is in a dry state;
[1531] (2) the HILIC load loaded to the solid phase extraction column has an amount of the plurality of proteolytically digested peptides characterized by one or both of:
[1532] (a) a ratio of a weight of the plurality of proteolytically digested peptides over a weight of the HILIC medium in the dry state of at least about 0.06; and/or
[1533] (b) a ratio of the weight of the plurality of proteolytically digested peptides relative to a bed volume of the HILIC medium in the dry state of at least about 40 μg/μl; or
[1534] (3) the HILIC load loaded to the solid phase extraction column has a concentration of an organic solvent of at least about 70% (v/v); and
[1535] (B) subjecting the HILIC medium to an elution liquid to obtain a HILIC eluate comprising the at least one proteolytically digested glycopeptide.
[1536] 2. The method of claim 1, wherein the one or more loading conditions comprise the loading of the HILIC load to the solid phase extraction column being initiated when the HILIC medium is in the dry state.
[1537] 3. The method of claim 1 or 2, wherein the HILIC load is characterized by having the ratio of the weight of the plurality of proteolytically digested peptides over the weight of the HILIC medium in the dry state of at least about 0.06.
[1538] 4. The method of any one of claims 1-3, wherein the HILIC load is characterized by having the ratio of the weight of the plurality of proteolytically digested peptides relative to the bed volume of the HILIC medium in the dry state of at least about 40 μg/μl.
[1539] 5. The method of any one of claims 1-4, wherein the weight of the HILIC medium in the dry state is about 3 mg or the bed volume of the HILIC medium in the dry state is about 5 μL.
[1540] 6. The method of claim 5, wherein the HILIC load is characterized by having the ratio of the weight of the plurality of proteolytically digested peptides over the weight of the HILIC medium in the dry state of about 0.1.
[1541] 7. The method of claim 5 or 6, wherein the HILIC load is characterized by having the ratio of the weight of the plurality of proteolytically digested peptides relative to the bed volume of the HILIC medium in the dry state of about 60 μg/μl.
[1542] 8. The method of claim 5, wherein the HILIC load is characterized by having the ratio of the weight of the plurality of proteolytically digested peptides over the weight of the HILIC medium in the dry state of about 0.2.
[1543] 9. The method of claim 5 or 8, wherein the HILIC load is characterized by having the ratio of the weight of the plurality of proteolytically digested peptides relative to the bed volume of the HILIC medium in the dry state of about 120 μg/μl.
[1544] 10. The method of any one of claims 1-9, wherein the one or more conditions comprise the HILIC load loaded to the solid phase extraction column having the concentration of the organic solvent of at least about 70% (v/v).
[1545] 11. The method of any one of claims 1-10, wherein the HILIC medium comprises less than about 5% (v/v) of a liquid at the initiation of the loading of the HILIC load to the solid phase extraction column.
[1546] 12. The method of claim 11, wherein, at the initiation of the loading of the HILIC load to the HILIC medium of the solid phase extraction column, the HILIC medium is not equilibrated with an equilibration liquid.
[1547] 13. The method of any one of claims 1-12, wherein the HILIC load comprises an amount of the plurality of proteolytically digested peptides of at least about 200 μg.
[1548] 14. The method of any one of claims 1-13, wherein the concentration of the organic solvent in the HILIC load is at least about 80% (v/v).
[1549] 15. The method of any one of claims 1-14, wherein the organic solvent comprises an aprotic solvent miscible in water.
[1550] 16. The method of any one of claims 1-15, wherein the organic solvent is selected from the group consisting of acetonitrile, ethanol, methanol, tetrahydrofuran, and dioxane, or a combination thereof.
[1551] 17. The method of any one of claims 1-16, further comprising obtaining the HILIC load.
[1552] 18. The method of claim 17, wherein obtaining the HILIC load comprises reducing a liquid content from the proteolytic digest sample without substantial loss of the plurality of proteolytically digested peptides in the proteolytic digest sample.
[1553] 19. The method of claim 18, wherein the reducing the liquid content from the proteolytic digested sample comprises performing a peptide concentrating technique with the proteolytically digested sample to obtain a precursor of the HILIC load such that (a) the precursor can be reconstituted with a reconstitution liquid comprising the organic solvent to obtain the HILIC load having a volume of 220 μL or less and a concentration of the organic solvent of at least about 70% (v/v); and (b) the resulting HILIC load comprises an amount of the plurality of proteolytically digested peptides of at least about 200 μg.
[1554] 20. The method of claim 17, further comprising:
[1555] reducing a liquid content from the proteolytic digest sample to form a dried proteolytic digest sample; and
[1556] reconstituting the dried proteolytic digest sample with a reconstitution liquid comprising the organic solvent to produce the HILIC load such that (a) the HILIC load has a volume of 220 μL or less and a concentration of the organic solvent of at least about 70% (v/v); and (b) the HILIC load has an amount of the plurality of proteolytic peptides of at least about 200 μg.
[1557] 21. The method of claim 20, wherein the reconstituting the dried proteolytic digest sample comprises:
[1558] mixing the dried proteolytic digest sample with an amount of water to form a water mixture: sonicating the water mixture with a sonicator;
[1559] mixing the water mixture with an amount of trifluoracetic acid (TFA) and acetonitrile (ACN), wherein the amount of TFA and ACN are such that the final concentration of TFA is 1% (v/v) and the final concentration of ACN is 80% (v/v); and
[1560] sonicating the water mixture having the amount of TFA and ACN with a sonicator to produce the HILIC load.
[1561] 22. The method of claim 21, wherein the sonicating the water mixture with the sonicator comprises a water-based dissolution cycle,
[1562] wherein the water-based dissolution cycle is repeated about 2 times to about 5 times,
[1563] and wherein for each of the water-based dissolution cycles, the sonicating the water mixture is performed for about 5 minutes and a water reservoir of the sonicator is configured with ice to cool the water reservoir.
[1564] 23. The method of claim 21 or 22, wherein the sonicating the water mixture having the amount of TFA and ACN with the sonicator comprises an organic-based dissolution cycle, wherein the organic-based dissolution cycle is repeated about 2 times to about 3 times, and wherein for each of the organic-based dissolution cycles, the sonicating is performed for about 4 minutes and a water reservoir of the sonicator is configured with ice to cool the water reservoir.
[1565] 24 The method of any one of claims 18-23, wherein the reducing the liquid content from the proteolytic digest sample comprises removing all or substantially all of the liquid content therefrom.
[1566] 25 The method of any one of claims 18-23, wherein the peptide concentrating technique comprises a vacuum evaporation technique or a lyophilization technique.
[1567] 26. The method of any one of claims 1-25, wherein the volume of the HILIC load is 220 μL or less.
[1568] 27. The method of any one of claims 1-26, wherein the HILIC medium comprises a solid phase or a solid phase comprising a polar functional moiety.
[1569] 28. The method of claim 27, wherein the solid phase comprises a silica material.
[1570] 29 The method of claim 27 or 28, wherein the polar functional moiety comprises one or more of an amino group, a cyano group, a carbamoyl group, an aminoalkyl group, alkylamide group, or a combination thereof.
[1571] 30. The method of any one of claims 1-29, further comprising performing a washing step after loading the HILIC load to the solid phase extraction column and prior to the subjecting the HILIC medium to the elution liquid, wherein the washing step comprises subjecting the HILIC medium to a wash liquid.
[1572] 31. The method of any one of claims 1-30, further comprising collecting the HILIC eluate, or a fraction thereof, from the solid phase extraction column, wherein the HILIC eluate comprises the at least one proteolytically digested glycopeptide.
[1573] 32. The method of claim 31, wherein after the collecting the HILIC eluate from the solid phase extraction column, the method further comprises reducing a liquid content of the collected HILIC eluate.
[1574] 33. The method of any one of claims 1-32, further comprising subjecting the HILIC eluate to a peptide concentrating technique to produce a dried HILIC eluate.
[1575] 34. The method of claim 33, further comprising reconstituting the dried HILIC eluate to form a sample suitable for introduction to the LC-MS system.
[1576] 35. The method of claim 34, further comprising injecting the sample suitable for introduction to the LC-MS system into the LC-MS system.
[1577] 36. The method of any one of claims 1-35, further comprising performing a mass spectrometry technique to obtain mass spectrometry data.
[1578] 37. The method of claim 36, further comprising identifying a peptide sequence of a glycopeptide from the mass spectrometry data.
[1579] 38. The method of claim 37, further comprising identifying a glycan attachment site of the glycopeptide from the mass spectrometry data.
[1580] 39. The method of claim 37 or 38, further comprising identifying a glycan structure of the glycopeptide from the mass spectrometry data.
[1581] 40. The method of any one of claims 1-39, wherein the at least one glycopeptide comprises a glycan structure comprising one or more sialic acid moieties.
[1582] 41. The method of any one of claims 1-40, wherein the proteolytic digest sample is obtained from a method for proteolytically digesting a biological sample comprising a glycoprotein.
[1583] 42. The method of any one of claims 1-41, wherein a glycopeptide concentration for a glycopeptide derived from the proteolytic digest sample is enriched by a factor of 30 or greater with respect to a peptide concentration, wherein the peptide concentration represents an amount of a peptide that is associated with the same protein as the glycopeptide.
[1584] 43. The method of any one of claims 1-42, further comprising:
[1585] measuring a first plurality of peak area values for a first panel of glycopeptides;
[1586] measuring a second plurality of peak area values for a second panel of unglycosylated peptides wherein each of the unglycosylated peptides of the second panel corresponds to each of the glycopeptides of the first panel by being attached to a same protein molecule before a proteolytic digestion;
[1587] calculating a plurality of ratios by dividing each of the first plurality of peak area values with each of the second plurality of peak area values, respectively; and
[1588] determining a median ratio from the plurality of ratios, wherein the median ratio is greater than 30.

### Section 6—Fibrinogen-Depletion and Use Thereof in Glycoproteomic Analysis

[1589] 1. A method of processing a blood-derived sample obtained from an individual for a glycoproteomic mass spectrometry (MS) technique, the method comprising:
[1590] (a) admixing the blood-derived sample with one or more defibrination factors to promote formation of a fibrin clot, the one or more defibrination factors comprises one or more members selected from the group consisting of:
[1591] a clotting co-factor;
[1592] a clotting enzyme; and
[1593] a clotting activator and/or an exogenous surface aggregation agent;
[1594] (b) separating the formed fibrin clot from the admixed blood-derived sample to obtain a fibrinogen-depleted sample; and
[1595] (c) subjecting the fibrinogen-depleted sample to one or more MS preparation techniques to produce a test sample for the glycoproteomic mass spectrometry technique.
[1596] 2. The method of claim 1, wherein the one or more defibrination factors comprises the clotting co-factor.
[1597] 3. The method of claim 2, wherein the clotting co-factor comprises a divalent cation.
[1598] 4. The method of claim 3, wherein the clotting co-factor comprises the divalent cation, and wherein the divalent cation is Ca²⁺, Mg²⁺, Zn²⁺, or Cu²⁺, or any combination thereof.
[1599] 5. The method of claim 3 or 4, wherein the divalent cation is Ca²⁺.
[1600] 6. The method of any one of claims 2-5, wherein the clotting co-factor is calcium chloride, calcium acetate, calcium carbonate, calcium citrate, or calcium gluconate, or any combination thereof.
[1601] 7. The method of any one of claims 2-6, wherein, following admixing with the blood-derived sample, the clotting co-factor has a concentration of about 5 mM to about 25 mM.
[1602] 8. The method of any one of claims 1-7, wherein the one or more defibrination factors comprises the clotting enzyme.
[1603] 9. The method of claim 8, wherein the clotting enzyme is thrombin.
[1604] 10. The method of claim 8 or 9, wherein, following admixing with the blood-derived sample, the clotting enzyme has a concentration of about 1 unit/mL to 10 units/mL.
[1605] 11. The method of any one of claim 1-10, wherein the one or more defibrination factors comprises the clotting activator and/or the exogenous surface aggregation agent.
[1606] 12. The method of claim 11, wherein the clotting activator and/or the exogenous surface aggregation agent is an exogenous surface aggregation agent.
[1607] 13. The method of claim 12, wherein the exogenous surface aggregation agent comprises Kaolin.
[1608] 14. The method of claim 11, wherein the clotting activator and/or the exogenous surface aggregation agent is a clotting activator and exogenous surface aggregation agent.
[1609] 15. The method of claim 14, wherein the clotting activator and exogenous surface aggregation agent comprises a material having pores with an average size of about 2 nm to about 60 nm.
[1610] 16. The method of claim 14 or 15, wherein the clotting activator and exogenous surface aggregation agent comprises a silica particle.
[1611] 17. The method of claim 16, wherein the silica particle has a pore size ranging from about 2 to about 60 nm.
[1612] 18. The method of any one of claims 11-17, wherein the clotting activator and/or the exogenous surface aggregation agent is admixed with the blood-derived sample at an amount of about 50 μg to about 500 μg per 40 μL of the blood-derived sample.
[1613] 19. The method of any one of claims 1-18, wherein the one or more defibrination factors comprise the clotting co-factor and the clotting enzyme.
[1614] 20. The method of any one of claims 1-18, wherein the one or more defibrination factors comprise the clotting co-factor and the clotting activator and/or the exogenous surface aggregation agent.
[1615] 21. The method of any one of claims 1-18, wherein the one or more defibrination factors comprise the clotting enzyme and the clotting activator and/or the exogenous surface aggregation agent.
[1616] 22. The method of any one of claims 1-18, wherein the one or more defibrination factors comprise the clotting co-factor, the clotting enzyme, and the clotting activator and/or the exogenous surface aggregation agent.
[1617] 23. The method of any one of claims 1-22, wherein more than one defibrination factor is admixed with the blood-derived sample sequentially.
[1618] 24. The method of any one of claims 1-22, wherein more than one defibrination factor is admixed with the blood-derived sample simultaneously.
[1619] 25. The method of any one of claims 1-24, wherein at least one of the one or more defibrination factors is added to a vessel containing the blood-derived sample.
[1620] 26. The method of any one of claims 1-25, wherein the blood-derived sample is added to a vessel containing at least one of the one or more defibrination factors.
[1621] 27. The method of any one of claims 1-26, wherein the method further comprises an incubation period following the admixing of the blood-derived sample with one or more defibrination factors.
[1622] 28. The method of claim 27, wherein the incubation period is about 1 minute to about 30 minutes.
[1623] 29 The method of any one of claims 1-28, wherein the separating the formed fibrin clot to obtain the fibrinogen-depleted sample comprises subjecting the admixed blood-derived sample with the one or more defibrination factors to a centrifugation technique and/or a filtration technique.
[1624] 30. The method of any one of claims 1-29, wherein the separating the formed fibrin clot to obtain the fibrinogen-depleted sample comprises subjecting the admixed blood-derived sample with the one or more defibrination factors to a supernatant collection technique.
[1625] 31. The method of any one of claims 1-30, wherein the fibrinogen-depleted sample is depleted of at least about 80% of the fibrinogen as compared to the blood-derived sample.
[1626] 32. The method of any one of claims 1-31, wherein the fibrinogen-depleted sample is depleted of at least about 99% of the fibrinogen as compared to the blood-derived sample.
[1627] 33. The method of any one of claims 1-32, wherein the blood-derived sample is a plasma sample.
[1628] 34. The method of claim 33, wherein the plasma sample has been treated with an anticoagulant.
[1629] 35. The method of claim 33 or 34, wherein the plasma sample has been treated with any one or more of the following: a citrate, an ACD (anticoagulant citrate dextrose), Streck, EDTA (ethylenediaminetetraacetic acid), Heparin or Li-Heparin, oxalate fluoride, or a citrate phosphate dextrose adenine (CPDA).
[1630] 36. The method of any one of claims 1-35, wherein the blood-derived sample is a serum sample.
[1631] 37. The method of any one of claims 1-36, wherein the one or more MS preparation techniques comprises subjecting the fibrinogen-depleted sample, or a derivative thereof, to a thermal denaturation technique.
[1632] 38. The method of any one of claims 1-37, wherein the one or more MS preparation techniques comprises subjecting the fibrinogen-depleted sample, or a derivative thereof, to a proteolytic digestion technique.
[1633] 39. The method of claim 38, wherein the proteolytic digestion technique comprises the use of one or more proteases.
[1634] 40. The method of claim 39, wherein proteolytic digestion technique comprises the use of trypsin.
[1635] 41. The method of claim 39 or 40, wherein the one or more proteases are present at a weight ratio of about 1:30 or less, relative to polypeptide content of the fibrinogen-depleted sample, or a derivative thereof.
[1636] 42. The method of any one of claims 1-41, wherein the one or more MS preparation techniques comprises subjecting the fibrinogen-depleted sample, or a derivative thereof, to a desalting technique.
[1637] 43. The method of any one of claims 1-42, further comprising performing the glycoproteomic mass spectrometry technique.
[1638] 44. The method of any one of claims 1-43, wherein the glycoproteomic mass spectrometry technique comprises a liquid chromatography-mass spectrometry (MS) (LC-MS) technique.
[1639] 45. The method of claim 44, wherein the LC-MS technique comprises a period of diversion of an initial eluate comprising a salt.
[1640] 46. The method of any one of claims 1-45, wherein the glycoproteomic mass spectrometry technique comprises a multiple-reaction-monitoring (MRM) technique targeting a glycopeptide.
[1641] 47. A method of preparing a plasma sample obtained from an individual for a glycoproteomic mass spectrometry technique, the method comprising:
[1642] (a) admixing the plasma sample with defibrination factors to promote formation of a fibrin clot, the defibrination factors comprising:
[1643] a clotting co-factor;
[1644] a clotting enzyme; and
[1645] a clotting activator and/or an exogenous surface aggregation agent;
[1646] (b) separating the formed fibrin clot from the admixed plasma sample to obtain a fibrinogen-depleted sample; and
[1647] (c) subjecting the fibrinogen-depleted sample to one or more MS preparation techniques to produce a test sample for the glycoproteomic mass spectrometry technique.
[1648] 48. The method of claim 47, wherein, after following admixing with the blood-derived sample:
[1649] the clotting co-factor comprises Ca²⁺ at a concentration of about 5 mM to about 25 mM;
[1650] the clotting enzyme comprises thrombin at a concentration of about 1 unit/mL to 10 units/mL;
[1651] and
[1652] the clotting activator and/or the exogenous surface aggregation agent is in an amount of about 50 μg to about 500 μg per 40 μL of the blood-derived sample.
[1653] 49. A defibrination composition comprising:
[1654] a clotting co-factor;
[1655] a clotting enzyme; and
[1656] a clotting activator and/or an exogenous surface aggregation agent.
[1657] 50. A vessel comprising a defibrination composition of claim 49.

### Section 7—Methods and Systems for Analyzing Site-Specific Monomer Composition

[1658] 1. A method for analyzing a set of peptide structures comprising a linking site, the method comprising:
   [1659] A) calculating a site occupancy score, for a given peptide structure at the linking site, as a function of an adjusted-raw abundance value for the given peptide structure and a sum of a set of adjusted-raw abundance values of the set of peptide structures; and
   [1660] B) calculating a monomer weight score as a sum of the site occupancy score and a multiplier, wherein the multiplier is the number of a specific monomer in the set of peptide structures at the linking site.
[1661] 2. The method of claim 1, further comprising, prior to (A), receiving a set of raw abundance values of the set of peptide structures and normalizing the set of raw abundance values to a corresponding reference run to generate the set of adjusted-raw abundance values.
[1662] 3. The method of claim 2, further comprising, prior to (B), calculating a peptide structure monomer weight score as a function of the site occupancy score and the number of a specific monomer for the given peptide structure.
[1663] 4. The method of claim 3, wherein the monomer weight score is a function of the peptide structure monomer weight score and the site occupancy score.
[1664] 5. The method of any one of claims 1-4, wherein the set of peptide structures is from a biological sample from a subject.
[1665] 6. The method of claim 5, wherein the biological sample comprises serum or plasma samples.
[1666] 7. The method of claim 6, wherein the reference run comprises serum or plasma samples.
[1667] 8. The method of any one of claims 1-7, further comprising:
   [1668] correlating the monomer weight score with an indication or disease state to determine a hazard ratio for the indication or disease state, wherein the hazard ratio is used to update a risk profile of the subject for the indication or disease state.
[1669] 9 The method of any one of claims 1-8, further comprising:
   [1670] generating a diagnosis output for the indication or disease state for the subject, using a predictive model, as a function of the monomer weight score, wherein the diagnosis output is one of a predictive probability or a risk score.
[1671] 10. The method of claim 9, wherein the predictive model is a logistic regression model, wherein the predictive model generates at least one marker that is correlated with the indication or disease state.
[1672] 11. The method of any one of claims 1-10, further comprising:
   [1673] calculating a site occupancy score, for a given peptide structure at the linking site, as the quotient of the adjusted-raw abundance value for the given peptide structure over the sum of the set of adjusted-raw abundance values.
[1674] 12. The method of any one of claims 1-11, further comprising:
   [1675] calculating a peptide structure monomer weight score as a product of the site occupancy score and the number of specific monomers for the given peptide structure.
[1676] 13. The method of claim 12, further comprising:
   [1677] calculating a monomer weight score for the subject as a sum of peptide structure monomer weight scores for each peptide structure at the linking site.
[1678] 14. The method of any one of claims 1-13, further comprising:
   [1679] generating a diagnosis output, based on the monomer weight score, for an indication or disease state, wherein the diagnosis output classifies the biological sample as evidencing a state associated with a disease state progression and/or responsiveness to a specific therapy.
[1680] 15. The method of any one of claims 1-14, wherein the set of raw abundance values is generated using multiple reaction monitoring mass spectrometry (MRM-MS).
[1681] 16. The method of any one of claims 1-15, further comprising:
   [1682] generating a diagnosis output based on the monomer weight score for an indication or disease state, and
   [1683] generating a treatment output based on at least one of the diagnosis output.
[1684] 17. The method of claim 16, wherein the treatment output comprises at least one of an identification of a treatment to treat the subject or a treatment plan.
[1685] 18. The method of claim 17, wherein the treatment comprises at least one of radiation therapy, chemoradiotherapy, surgery, immunotherapy, hormone therapy, or a targeted drug therapy.
[1686] 19. The method of claim 18, wherein the treatment comprises immunotherapy, wherein the immunotherapy is immune checkpoint blockade therapy.
[1687] 20. The method of claim 19 wherein the immune checkpoint blockade therapy comprises ipilimumab, nivolumab, and/or pembrolizumab.
[1688] 21. The method of any one of claims 1-20, further comprising generating a diagnosis output, wherein generating the diagnosis output comprises:
   [1689] generating a report identifying that the biological sample evidences the indication or disease state.
[1690] 22. The method of any one of claims 1-21, wherein the specific monomer is selected from the group consisting of hexose, HexNac, fucose, and sialic acid.
[1691] 23. The method of claim 22, wherein the specific monomer is selected from the group consisting of glucose, mannose, galactose, GlcNAc, GalNAc, fucose, NeuGc, and NeuAc.
[1692] 24. The method of any one of claims 1-23, further comprising calculating a second monomer weight score as a sum of the site occupancy score and a second multiplier, wherein the second multiplier is the number of a second monomer in the set of peptide structures at the linking site, wherein the second monomer is different from the specific monomer.
[1693] 25. The method of any one of claims 1-24, further comprising calculating a plurality of additional monomer weight scores as functions of the site occupancy score and a plurality of additional multipliers, wherein the plurality of additional multipliers are the number of a plurality of additional monomers in the set of peptide structures at the linking site.
[1694] 26. A method of classifying a biological sample with respect to risk of melanoma progression and/or responsiveness to immune checkpoint inhibitor therapy, the method comprising:
   [1695] A) analyzing one or more monomer weight scores of a set of peptide structures from a biological sample from the subject using a machine learning model to generate a disease indicator; and
   [1696] B) generating a diagnosis output based on the disease indicator that classifies the biological sample as evidencing a state associated with melanoma progression and/or responsiveness to immune checkpoint inhibitory therapy.
[1697] 27. The method of claim 26, further comprising:
   [1698] receiving a set of raw abundance values of the set of peptide structures and normalizing the set of raw abundance values to a corresponding reference run to generate the set of adjusted-raw abundance values.
[1699] 28. The method claim 27, further comprising:
   [1700] calculating a site occupancy score, for a given peptide structure at the linking site, as the function of the adjusted-raw abundance value for the given peptide structure and the sum of the set of adjusted-raw abundance values.
[1701] 29. The method of claim 27 or 28, further comprising:
   [1702] calculating a site occupancy score, for a given peptide structure at the linking site, as the quotient of the adjusted-raw abundance value for the given peptide structure over the sum of the set of adjusted-raw abundance values.
[1703] 30. The method of any one of claims 28-29, further comprising:
   [1704] calculating a peptide structure monomer weight score as a function of the site occupancy score and the number of specific monomers for the given peptide structure.
[1705] 31. The method of any one of claims 28-30, further comprising:
   [1706] calculating a peptide structure monomer weight score as a product of the site occupancy score and the number of specific monomers for the given peptide structure.
[1707] 32. The method of any one of claims 30-31, further comprising:
   [1708] calculating a monomer weight score of the one or more monomer weight scores as a sum of peptide structure monomer weight scores for each peptide structure at the linking site.
[1709] 33. The method of any one of claims 26-32, wherein the set of peptide structures comprises post translationally modified (PTM) peptides and/or non-PTM peptides.
[1710] 34. The method of any one of claims 26-33, wherein the monomer is selected from the group consisting of hexose, HexNac, fucose, and sialic acid.
[1711] 35. The method of claim 34, wherein the monomer is selected from the group consisting of glucose, mannose, galactose, GlcNAc, GalNAc, fucose, NeuGc, and NeuAc.
[1712] 36. The method of any one of claims 26-35, wherein the set of peptides structures comprises glycosylated peptides and non-glycosylated peptides.
[1713] 37. The method of any one of claims 26-36, wherein the biological sample comprises serum or plasma samples.
[1714] 38. The method of any one of claims 27-37, wherein the reference run comprises serum or plasma samples.
[1715] 39. The method of any one of claims 26-38, further comprising:
   [1716] treating the biological sample to form a prepared sample comprising the set of peptide structures, the set of peptide structures comprising a set of post translationally modified (PTM) peptides and/or non-PTM peptides;
   [1717] detecting a set of product ions associated with each structure of the set of post translationally modified (PTM) peptides and/or non-PTM peptides, and
   [1718] generating the set of raw abundance values for the set of product ions.
[1719] 40. The method of any one of claims 26-39, wherein the analyzing further comprises:
   [1720] correlating the monomer weight score with a melanoma disease state to determine a hazard ratio for the melanoma disease state, wherein the hazard ratio is used to update a risk profile of the subject for the melanoma disease state.
[1721] 41. The method of any one of claims 26-40, further comprising:
   [1722] generating a diagnosis output based on the disease indicator that classifies the biological sample as evidencing a state associated with melanoma progression and/or responsiveness to immune checkpoint inhibitory therapy, wherein the diagnosis output is one of a predictive probability or a risk score.
[1723] 42. The method of any one of claims 26-41, wherein the set of raw abundance values is generated using multiple reaction monitoring mass spectrometry (MRM-MS).
[1724] 43. The method of any one of claims 26-42, further comprising:
   [1725] generating a treatment output based on at least one of the diagnosis output.
[1726] 44. The method of claim 43, wherein the treatment output comprises at least one of an identification of a treatment to treat the subject or a treatment plan.
[1727] 45. The method of claim 44, wherein the treatment comprises at least one of radiation therapy, chemoradiotherapy, surgery, hormone therapy, or a targeted drug therapy.
[1728] 46. The method of any one of claims 26-45, wherein generating the diagnosis output comprises:
   [1729] generating a report identifying that the biological sample evidences the indication or disease state.
[1730] 47. The method of any one of claims 26-46, wherein the one or more monomer weight scores correspond to at least one site monomer identified in Table 16.
[1731] 48. The method of any one of claims 26-46, wherein the one or more monomer weight scores correspond to at least one site monomer identified in Table 17.
[1732] 49. The method of any one of claims 26-46, wherein the one or more monomer weight scores correspond to at least one site monomer identified in Table 18.
[1733] 50. The method of any one of claims 26-49, further comprising:
   [1734] training the at least one supervised machine learning model using training data,
   [1735] wherein the training data comprises a plurality of peptide structure profiles for a plurality of subjects and a plurality of subject diagnoses for the plurality of subjects.
[1736] 51. The method of claim 50, wherein the plurality of subject diagnoses is selected from the group consisting of a positive diagnosis for any subject of the plurality of subjects determined to have a melanoma disease state, a negative diagnosis for any subject of the plurality of subjects determined not to have a melanoma disease state, a positive diagnosis for any subject of the plurality of subjects determined to be likely to benefit from immune checkpoint inhibitory therapy, and a negative diagnosis for any subject of the plurality of subjects determined to be unlikely to benefit from immune checkpoint inhibitory therapy.
[1737] 52. The method of claim 51, wherein the plurality of subjects are separated into classes of positive and negative diagnoses using a concordance index as a cutoff between positive and negative diagnoses.
[1738] 53. The method of any one of claims 50-52, further comprising:
   [1739] performing a differential expression analysis using the training data to compare a first portion of the plurality of subjects with the positive diagnosis for melanoma disease state or subjects unlikely to benefit from immune checkpoint inhibitory therapy, versus a second portion of the plurality of subjects having the negative diagnosis for melanoma disease state or subjects likely to benefit from immune checkpoint inhibitory therapy; and
   [1740] identifying a training group of peptide structures based on the differential expression analysis for use as prognostic markers for the melanoma disease state and/or responsiveness to immune checkpoint inhibitory therapy; and
   [1741] forming the training data based on the training group of peptide structures identified.
[1742] 54. The method of any one of claims 26-53, wherein the at least one supervised machine learning model comprises a logistic regression model, and wherein the at least one supervised learning model compares the negative diagnosis versus the positive diagnosis, wherein the comparison can be at least one non-melanoma state vs at least one melanoma state, or the comparison can be at least one positive response to immune checkpoint inhibitory therapy vs at least one negative response to immune checkpoint inhibitory therapy.
[1743] 55. A method of treating melanoma in a subject, the method comprising:
   [1744] A) analyzing one or more monomer weight scores corresponding to at least one site monomer identified in Table 16 using a machine learning model to generate a diagnosis output that classifies the biological sample as evidencing a state associated with melanoma progression, and
   [1745] B) administering a therapeutically effective amount of a treatment for melanoma.
[1746] 56. The method of claim 55, further comprising:
   [1747] receiving a set of raw abundance values of the set of peptide structures and normalizing the set of raw abundance values to a corresponding reference run to generate the set of adjusted-raw abundance values.
[1748] 57. The method of claim 56, further comprising:
   [1749] calculating a site occupancy score, for a given peptide structure at the linking site, as the function of the adjusted-raw abundance value for the given peptide structure and the sum of the set of adjusted-raw abundance values.
[1750] 58 The method claim 56 or 57, further comprising:
   [1751] calculating a site occupancy score, for a given peptide structure at the linking site, as the quotient of the adjusted-raw abundance value for the given peptide structure over the sum of the set of adjusted-raw abundance values.
[1752] 59. The method of any one of claims 57-58, further comprising:
   [1753] calculating a peptide structure monomer weight score as a function of the site occupancy score and the number of specific monomers for the given peptide structure.
[1754] 60. The method of any one of claims 57-59, further comprising:
   [1755] calculating a peptide structure monomer weight score as a product of the site occupancy score and the number of specific monomers for the given peptide structure.
[1756] 61. The method of claim 59 or 60, further comprising:
   [1757] calculating the a monomer weight score of the one or more monomer weight scores as a sum of peptide structure monomer weight scores for each peptide structure at the linking site.
[1758] 62. The method of any one of claims 55-61, wherein the set of peptide structures comprises post translationally modified (PTM) peptides and/or non-PTM peptides.
[1759] 63. The method of any one of claims 55-62, wherein the monomer is selected from the group consisting of hexose, HexNac, fucose, and sialic acid.
[1760] 64. The method of claim 63, wherein the monomer is selected from the group consisting of glucose, mannose, galactose, GlcNAc, GalNAc, fucose, NeuGc, and NeuAc.
[1761] 65. The method of any one of claims 55-64, wherein the set of peptides structures comprises glycosylated peptides and non-glycosylated peptides.
[1762] 66. The method of any one of claims 55-65, wherein the biological sample comprises serum or plasma samples.
[1763] 67. The method of any one of claims 56-66, wherein the reference run comprises serum or plasma samples.
[1764] 68. The method of any one of claims 55-67, further comprising:
   [1765] treating the biological sample to form a prepared sample comprising the set of peptide structures, the set of peptide structures comprising a set of post translationally modified (PTM) peptides and/or non-PTM peptides;
   [1766] detecting a set of product ions associated with each structure of the set of post translationally modified (PTM) peptides and/or non-PTM peptides, and
   [1767] generating the set of raw abundance values for the set of product ions.
[1768] 69. The method of any one of claims 55-68, wherein the analyzing further comprises:
   [1769] correlating the one or more monomer weight scores with a melanoma disease state to determine a hazard ratio for the melanoma disease state, wherein the hazard ratio is used to update a risk profile of the subject for the melanoma disease state.
[1770] 70. The method of any one of claims 55-69, further comprising:
   [1771] generating a diagnosis output based on a disease indicator that classifies the biological sample as evidencing a state associated with melanoma progression, wherein the diagnosis output is one of a predictive probability or a risk score.
[1772] 71. The method of any one of claims 55-70, wherein the set of raw abundance values is generated using multiple reaction monitoring mass spectrometry (MRM-MS).
[1773] 72. The method of any one of claims 55-71, wherein the treatment comprises at least one of radiation therapy, chemoradiotherapy, immunotherapy, surgery, hormone therapy, or a targeted drug therapy.
[1774] 73. The method of claim 72, wherein the treatment comprises immunotherapy, wherein the immunotherapy is immune checkpoint blockade therapy.
[1775] 74. The method of claim 73 wherein the immune checkpoint blockade therapy comprises ipilimumab, nivolumab, and/or pembrolizumab.
[1776] 75. The method of any one of claims 55-74, wherein generating the diagnosis output comprises:
   [1777] generating a report identifying that the biological sample evidences the indication or disease state.
[1778] 76. The method of any one of claims 55-75, wherein the one or more monomer weight scores correspond to at least one site monomer identified in Table 17.
[1779] 77. The method of any one of claims 55-75, wherein the one or more monomer weight scores correspond to at least one site monomer identified in Table 18.
[1780] 78. The method of any one of claims 55-77, further comprising:
   [1781] training the at least one supervised machine learning model using training data,
   [1782] wherein the training data comprises a plurality of peptide structure profiles for a plurality of subjects and a plurality of subject diagnoses for the plurality of subjects.
[1783] 79. The method of claim 78, wherein the plurality of subject diagnoses is selected from the group consisting of a positive diagnosis for any subject of the plurality of subjects determined to have a melanoma disease state, a negative diagnosis for any subject of the plurality of subjects determined not to have a melanoma disease state, a positive diagnosis for any subject of the plurality of subjects determined to be likely to benefit from immune checkpoint inhibitory therapy, and a negative diagnosis for any subject of the plurality of subjects determined to be unlikely to benefit from immune checkpoint inhibitory therapy.
[1784] 80. The method of claim 79, wherein the plurality of subjects are separated into classes of positive and negative diagnoses using a concordance index as a cutoff between positive and negative diagnoses.
[1785] 81. The method of any one of claims 78-80, further comprising:
   [1786] performing a differential expression analysis using the training data to compare a first portion of the plurality of subjects with the positive diagnosis for melanoma disease state or subjects unlikely to benefit from immune checkpoint inhibitory therapy, versus a second portion of the plurality of subjects having the negative diagnosis for melanoma disease state or subjects likely to benefit from immune checkpoint inhibitory therapy; and
   [1787] identifying a training group of peptide structures based on the differential expression analysis for use as prognostic markers for the melanoma disease state and/or responsiveness to immune checkpoint inhibitory therapy; and
   [1788] forming the training data based on the training group of peptide structures identified.
[1789] 82. The method of any one of claims 55-81, wherein the at least one supervised machine learning model comprises a logistic regression model, and wherein the at least one supervised learning model compares the negative diagnosis versus the positive diagnosis, wherein the comparison can be at least one non-melanoma state vs at least one melanoma state, or the comparison can be at least one positive response to immune checkpoint inhibitory therapy vs at least one negative response to immune checkpoint inhibitory therapy.
[1790] 83. A system comprising:
   [1791] one or more data processors; and
   [1792] a non-transitory computer readable storage medium containing instructions which, when executed on the one or more data processors, cause the one or more data processors to perform part or all of the method of any one of claims 1-82.
[1793] 84. A computer-program product tangibly embodied in a non-transitory machine-readable storage medium, including instructions configured to cause one or more data processors to perform part or all of the method of any one of claims 1-82.
[1794] 85. A method of monitoring a subject for a melanoma, the method comprising:
   [1795] receiving first monomer weight score data for a first biological sample obtained from a subject at a first timepoint;
   [1796] analyzing the first monomer weight score data using at least one supervised machine learning model to generate a first disease indicator based on at least one site monomer selected from a group of site monomers identified in Table 16, wherein the group of site monomers in Table 16 comprises a group of site monomers having monomer weight scores associated with melanoma;
   [1797] receiving second monomer weight score data of a second biological sample obtained from the subject at a second timepoint;
   [1798] analyzing the second monomer weight score data using the at least one supervised machine learning model to generate a second disease indicator based on the at least one site monomer selected from the group of site monomers identified in Table 16; and
   [1799] generating a diagnosis output based on the first disease indicator and the second disease indicator.
[1800] 86. The method of claim 85, wherein generating the diagnosis output comprises: comparing the second disease indicator to the first disease indicator.
[1801] 87. The method of claim 85 or 86, wherein the first disease indicator indicates that the first biological sample evidences a negative diagnosis for melanoma and the second biological sample evidences a positive diagnosis for melanoma.
[1802] 88. The method of claim 85 or 86, wherein the first disease indicator indicates that the first biological sample evidences a melanoma that is not responsive to immunotherapy and the second biological sample evidences a melanoma that is responsive to immunotherapy.
[1803] 89. The method of any one of claims 85-88, wherein the at least one supervised machine learning model comprises a logistic regression model, and wherein the at least one supervised learning model compares negative diagnoses versus positive diagnoses, wherein the comparison can be at least one healthy state versus melanoma generally, healthy state versus immunotherapy responsive melanoma, or immunotherapy nonresponsive melanoma versus immunotherapy responsive melanoma.
[1804] 90. The method of any one of claims 85-89, wherein the at least one site monomer comprises at least one site monomer identified in Table 18.
[1805] 91. The method of any one of claims 85-89, wherein the at least one site monomer comprises at all site monomers identified in Table 18.
[1806] 92. A method of treating melanoma in a subject, the method comprising:
   [1807] determining a monomer weight score for at least one site monomer identified in Table 16 in a biological sample from the subject using a multiple reaction monitoring mass spectrometry (MRM-MS) system;
   [1808] analyzing the monomer weight score using at least one machine learning model to generate a disease indicator;
   [1809] generating a diagnosis output based on the disease indicator that classifies the biological sample as evidencing that the patient has melanoma; and
   [1810] administering to the subject a therapeutically effective amount of a melanoma therapy.
[1811] 93. The method of claim 92, wherein the melanoma therapy comprises radiation therapy, chemotherapy, chemoradiotherapy, surgery, hormone therapy, immunotherapy, or a targeted drug therapy.
[1812] 94. The method of claim 93, wherein the melanoma therapy comprises immunotherapy.
[1813] 95. The method of claim 94, wherein the immunotherapy comprises immune checkpoint blockade therapy.
[1814] 96. The method of claim 19 wherein the immune checkpoint blockade therapy comprises ipilimumab, nivolumab, and/or pembrolizumab.
[1815] 97. The method of claim 92, wherein the melanoma therapy does not comprise immunotherapy.
[1816] 98. The method of any one of claims 92-97, further comprising: preparing the biological sample to form a prepared sample comprising a set of peptide structures; and inputting the prepared sample into the MRM-MS system using a liquid chromatography system.
[1817] 99. The method of any one of claims 92-98, wherein the at least one site monomer comprises at least one site monomer identified in Table 17.
[1818] 100. The method of any one of claims 92-98, wherein the at least one site monomer comprises at least one site monomer identified in Table 18.
[1819] 101. The method of any one of claims 92-98, wherein the at least one site monomer comprises at all site monomers identified in Table 18.
[1820] 102. A method of treating melanoma in a subject, the method comprising:
   [1821] determining a monomer weight score for at least one site monomer identified in Table 16 in a biological sample from the subject using a multiple reaction monitoring mass spectrometry (MRM-MS) system;
   [1822] analyzing the monomer weight score using at least one machine learning model to generate a disease indicator;
   [1823] generating a diagnosis output based on the disease indicator that classifies the biological sample as evidencing that the melanoma is sensitive to immunotherapy; and
   [1824] administering to the subject a therapeutically effective amount of immunotherapy.
[1825] 103. The method of claim 102, wherein the immunotherapy comprises immune checkpoint blockade therapy.
[1826] 104. The method of claim 103 wherein the immune checkpoint blockade therapy comprises ipilimumab, nivolumab, and/or pembrolizumab.
[1827] 105. The method of claim 102, 103, or 104, wherein the at least one site monomer comprises at least one site monomer identified in Table 17.
[1828] 106. The method of claim 102, 103, or 104, wherein the at least one site monomer comprises at least one site monomer identified in Table 18.
[1829] 107. The method of claim 102, 103, or 104, wherein the at least one site monomer comprises at all site monomers identified in Table 18.
[1830] 108. A method of identifying a need for one or more medical tests for a subject suspected of being at risk for or having melanoma, the method comprising: subjecting the subject to the one or more medical tests in response to measuring that a biological sample obtained from the subject evidences the subject as having melanoma using part or all of the method of any one of claims 1-82.
[1831] 109. The method of claim 108, wherein the one or more medical tests comprises colonoscopy, physical exam, CT scan, MRI scan, PET scan, or a combination thereof.
[1832] 110. A method of designing a treatment for a subject having melanoma, the method comprising: designing a therapeutic regimen for treating the subject in response to measuring that a biological sample obtained from the subject evidences the subject as having melanoma using part or all of the method of any one of claims 1-82.
[1833] 111. The method of claim 110, wherein the treatment comprises at least one of radiation therapy, chemotherapy, chemoradiotherapy, immunotherapy, surgery, hormone therapy, or a targeted drug therapy.
[1834] 112. A method of treating a subject diagnosed with melanoma, the method comprising: administering to the subject immunotherapy to treat the subject based on measuring that a biological sample obtained from the subject evidences the melanoma as being sensitive to immunotherapy using part or all of the method of any one of claims 1-82.
[1835] 113. The method of claim 112, wherein the immunotherapy comprises immune checkpoint blockade therapy.
[1836] 114. A method of classifying a sample from an individual suspected of having, known to have, or at risk for melanoma, comprising the step of determining from the sample a monomer weight score for one or more of the site monomers in Table 16.
[1837] 115. The method of claim 114, wherein the measuring identifies the individual as not having melanoma.
[1838] 116. The method of claim 114, wherein the measuring identifies the individual as having melanoma.
[1839] 117. The method of claim 116, further comprising administering to the individual an effective amount of at least one of radiation therapy, chemotherapy, chemoradiotherapy, immunotherapy, surgery, hormone therapy, or a targeted drug therapy.
[1840] 118. The method of claim 114, wherein the measuring identifies the individual as having melanoma that is sensitive to immunotherapy.
[1841] 119. The method of claim 114, wherein the measuring identifies the individual as having melanoma that is not sensitive to immunotherapy.
[1842] 120. The method of any one of claims 114-119, wherein the sample comprises peripheral blood, plasma, or serum.
[1843] 121. The method of any one of claims 114-120, wherein the individual is at risk for melanoma.
[1844] 122. The method of any one of claims 114-121, wherein a monomer weight score is determined for one or more of the site monomers identified in Table 17.
[1845] 123. The method of any one of claims 114-121, wherein a monomer weight score is determined for one or more of the site monomers identified in Table 18.
[1846] 124. The method of claim 123, wherein a monomer weight score is determined for all site monomers identified in Table 18.
[1847] 125. A method of predicting a risk for melanoma in a subject, the method comprising:
   [1848] determining a monomer weight score for at least one site monomer identified in Table 16 in a biological sample from the subject using a multiple reaction monitoring mass spectrometry (MRM-MS) system;
   [1849] analyzing the monomer weight score using at least one machine learning model to generate a disease indicator; and
   [1850] generating a diagnosis output based on the disease indicator that classifies the biological sample as evidencing that the patient has a risk for melanoma.
[1851] 126. The method of claim 125, wherein the at least one site monomer comprises at least one site monomer identified in Table 17.
[1852] 127. The method of claim 125, wherein the at least one site monomer comprises at least one site monomer identified in Table 18.
[1853] 128. The method of claim 125, wherein the at least one site monomer comprises at all site monomers identified in Table 18.
[1854] 129. A method of predicting immunotherapy sensitivity, the method comprising:
   [1855] determining a monomer weight score for at least one site monomer identified in Table 16 in a biological sample from the subject using a multiple reaction monitoring mass spectrometry (MRM-MS) system;
   [1856] analyzing the monomer weight score using at least one machine learning model to generate a disease indicator; and
   [1857] generating a diagnosis output based on the disease indicator that classifies the biological sample as evidencing that the patient has a risk for melanoma.
[1858] 130. The method of claim 129, wherein the at least one site monomer comprises at least one site monomer identified in Table 17.
[1859] 131. The method of claim 129, wherein the at least one site monomer comprises at least one site monomer identified in Table 18.
[1860] 132. The method of claim 129, wherein the at least one site monomer comprises at all site monomers identified in Table 18.
[1861] 133. A method of classifying a biological sample with respect to a responsiveness to immune checkpoint inhibitor therapy, the method comprising:
   [1862] A) analyzing one or more monomer weight scores of a set of peptide structures from a biological sample from the subject using a machine learning model to generate a disease indicator; and
   [1863] B) generating a diagnosis output based on the disease indicator that classifies the biological sample as evidencing the responsiveness to immune checkpoint inhibitory therapy, wherein the one or more monomer weight scores correspond to at least one site monomer identified in Table 29.
[1864] 134. A method of classifying a biological sample with respect to a responsiveness to immune checkpoint inhibitor therapy, the method comprising:
   [1865] A) analyzing one or more monomer weight scores of a set of peptide structures from a biological sample from the subject using a machine learning model to generate a disease indicator;
   [1866] B) generating a diagnosis output based on the disease indicator that classifies the biological sample as evidencing the responsiveness to immune checkpoint inhibitory therapy, wherein the one or more monomer weight scores correspond to at least one site monomer identified in Table 29; and
   [1867] C) administering to the subject a therapeutically effective amount of immunotherapy.
[1868] 135. A method for managing a treatment for a subject diagnosed with a melanoma, the method comprising:
[1869] receiving peptide structure data corresponding to a set of glycoproteins in a biological sample obtained from the subject;
[1870] computing a treatment score using quantification data identified from the peptide structure data for a set of peptide structures, wherein the set of peptide structures includes at least one peptide structure identified from a plurality of peptide structures listed in Table 23A;
[1871] generating a treatment output that indicates a predicted response to the treatment for the subject using the treatment score.
[1872] 136. The method of claim 135, wherein the at least one peptide structure of Table 23A includes a glycan symbol structure or a glycan composition in accordance with Table 23C.

### Section 8—Methods and Systems for Analyzing Site-Specific Monomer Composition

[1873] 1. A method for predicting retention times of peptides, by a computing system comprising one or more processors:
[1874] accessing a feature set corresponding to a peptide, wherein the feature set represents peptide sequence data of the peptide and corresponding physicochemical features;
[1875] sending the feature set as an input into a neural network, the neural network comprising: (1) a plurality of 1DCNN layers, (2) one or more BiLSTM layers, and (3) a multi-head attention layer;
[1876] and
[1877] obtaining, as an output from the neural network, a predicted retention time for the peptide corresponding to an estimated retention time for the peptide in a liquid chromatography mass spectrometry (LC-MS) run.
[1878] 2. The method of claim 1, wherein the neural network further comprises a flatten and dense layer as a final output layer.
[1879] 3. The method of claim 1, wherein the feature set for a peptide is generated by:
[1880] encoding a peptide sequence of the peptide to generate a matrix representation of the peptide; compressing the matrix representation to a vector representation; and
[1881] concatenating, to the vector representation, one or more corresponding physiochemical features that are determined to be associated with the peptide or peptide sequence.
[1882] 4. The method of claim 3, wherein generating the feature set further comprises normalizing the concatenated vector representation between 0 and 1.
[1883] 5. The method of claim 3, wherein the peptide sequence data is encoded using one-hot encoding.
[1884] 6. The method of claim 5, wherein the matrix representation comprises:
[1885] 20 columns corresponding to 20 unique amino acids, and
[1886] n rows, wherein each row corresponds to a position in a sequence of the corresponding peptide,
[1887] and wherein n corresponds to a length of the corresponding peptide.
[1888] 7. The method of claim 3, wherein the peptide sequence data is encoded using BLOSUM 62.
[1889] 8. The method of claim 7, wherein the encoding generates a matrix comprising:
[1890] 20 columns corresponding to 20 unique amino acids;
[1891] 3 columns corresponding to 3 special amino acid characters; and
[1892] 1 column corresponding to a translation stop.
[1893] 9. A method of training a neural network for predicting retention times of peptides, by a computing system comprising one or more processors:
[1894] accessing a plurality of feature sets corresponding to a plurality of peptides, wherein the feature set represents peptide sequence data of the peptide and corresponding physicochemical features; creating a training set comprising a subset of feature sets from the plurality of feature sets; and training a neural network using the training set, the neural network comprising: (1) a plurality of 1DCNN layers, (2) one or more BiLSTM layers, and (3) a multi-head attention layer.
[1895] 10. The method of claim 9, further comprising:
[1896] creating a validation set comprising a subset of feature sets from the plurality of feature sets;
[1897] sending the validation set through the neural network; and
[1898] evaluating the outputs.
[1899] 11. The method of claim 10, wherein the training set comprises 80% of the plurality of feature sets and the validation set comprises 30% of the plurality of feature sets.
[1900] 12. A system for predicting retention times of peptides, the system comprising:
[1901] one or more processors; and
[1902] a non-transitory memory coupled to the processors comprising instructions executable by the processors, the processors operable when executing the instructions to:
[1903] access a feature set corresponding to a peptide, wherein the feature set represents peptide sequence data of the peptide and corresponding physicochemical features;
[1904] send the feature set as an input into a neural network, the neural network comprising: (1) a plurality of 1DCNN layers, (2) one or more BiLSTM layers, and (3) a multi-head attention layer.
[1905] obtain, as an output from the neural network, a predicted retention time for the peptide corresponding to an estimated retention time for the peptide in a liquid chromatography mass spectrometry (LC-MS) run.
[1906] 13. A system for training a neural network for predicting retention times of peptides, the system comprising:
[1907] one or more processors; and
[1908] a non-transitory memory coupled to the processors comprising instructions executable by the processors, the processors operable when executing the instructions to:
[1909] access a plurality of feature sets corresponding to a plurality of peptides, wherein the feature set represents peptide sequence data of the peptide and corresponding physicochemical features;
[1910] create a training set comprising a subset of feature sets from the plurality of feature sets; and
[1911] train a neural network using the training set, the neural network comprising: (1) a plurality of 1DCNN layers, (2) one or more BiLSTM layers, and (3) a multi-head attention layer.
[1912] 14. A computer-readable medium comprising instructions thereon, which when executed by a processor causes the processor to perform the method of any one of claims 1 to 11.

The application's sequence listing, which the Patent Office published only in electronic form, follows.

SEQUENCE LISTING (57123 sequences)

SEQ ID NO: 1 - protein, 418 aa, Homo sapiens
  CARBOHYD 107: note = N is linked to glycan structure Hex(5)HexNAc(4)Fuc(1)NeuAc(2)
  CARBOHYD 107: note = N is linked to glycan structure Hex(6)HexNAc(5)Fuc(0)NeuAc(3)
  CARBOHYD 70: note = L is linked to glycan structure Hex(5)HexNAc(4)Fuc(1)NeuAc(2)
MPSSVSWGILLLAGLCCLVPVSLAEDPQGDAAQKTDTSHHDQDHPTFNKITPNLAEFAFSLYRQLAHQSNSTNIFFSPVSIATAFAMLSLGTKADTHDEILEGLNFNLTEIPEAQIHEGFQELLRTLNQPDSQLQLTTGNGLFLSEGLKLVDKFLEDVKKLYHSEAFTVNFGDTEEAKKQINDYVEKGTQGKIVDLVKELDRDTVFALVNYIFFKGKWERPFEVKDTEEEDFHVDQVTTVKVPMMKRLGMFNIQHCKKLSSWVLLMKYLGNATAIFFLPDEGKLQHLENELTHDIITKFLENEDRRSASLHLPKLSITGTYDLKSVLGQLGITKVFSNGADLSGVTEEAPLKLSKAVHKAVLTIDEKGTEAAGAMFLEAIPMSIPPEVKFNKPFVFLMIEQNTKSPLFMGKVVNPTQK

SEQ ID NO: 2 - protein, 1474 aa, Homo sapiens
  CARBOHYD 869: note = N is linked to glycan structure Hex(5)HexNAc(2)Fuc(0)NeuAc(0)
MGKNKLLHPSLVLLLLVLLPTDASVSGKPQYMVLVPSLLHTETTEKGCVLLSYLNETVTVSASLESVRGNRSLFTDLEAENDVLHCVAFAVPKSSSNEEVMFLTVQVKGPTQEFKKRTTVMVKNEDSLVFVQTDKSIYKPGQTVKFRVVSMDENFHPLNELIPLVYIQDPKGNRIAQWQSFQLEGGLKQFSFPLSSEPFQGSYKVVVQKKSGGRTEHPFTVEEFVLPKFEVQVTVPKIITILEEEMNVSVCGLYTYGKPVPGHVTVSICRKYSDASDCHGEDSQAFCEKFSGQLNSHGCFYQQVKTKVFQLKRKEYEMKLHTEAQIQEEGTVVELTGRQSSEITRTITKLSFVKVDSHFRQGIPFFGQVRLVDGKGVPIPNKVIFIRGNEANYYSNATTDEHGLVQFSINTTNVMGTSLTVRVNYKDRSPCYGYQWVSEEHEEAHHTAYLVFSPSKSFVHLEPMSHELPCGHTQTVQAHYILNGGTLLGLKKLSFYYLIMAKGGIVRTGTHGLLVKQEDMKGHFSISIPVKSDIAPVARLLIYAVLPTGDVIGDSAKYDVENCLANKVDLSFSPSQSLPASHAHLRVTAAPQSVCALRAVDQSVLLMKPDAELSASSVYNLLPEKDLTGFPGPLNDQDNEDCINRHNVYINGITYTPVSSTNEKDMYSFLEDMGLKAFTNSKIRKPKMCPQLQQYEMHGPEGLRVGFYESDVMGRGHARLVHVEEPHTETVRKYFPETWIWDLVVVNSAGVAEVGVTVPDTITEWKAGAFCLSEDAGLGISSTASLRAFQPFFVELTMPYSVIRGEAFTLKATVLNYLPKCIRVSVQLEASPAFLAVPVEKEQAPHCICANGRQTVSWAVTPKSLGNVNFTVSAEALESQELCGTEVPSVPEHGRKDTVIKPLLVEPEGLEKETTFNSLLCPSGGEVSEELSLKLPPNVVEESARASVSVLGDILGSAMQNTQNLLQMPYGCGEQNMVLFAPNIYVLDYLNETQQLTPEIKSKAIGYLNTGYQRQLNYKHYDGSYSTFGERYGRNQGNTWLTAFVLKTFAQARAYIFIDEAHITQALIWLSQRQKDNGCFRSSGSLLNNAIKGGVEDEVTLSAYITIALLEIPLTVTHPVVRNALFCLESAWKTAQEGDHGSHVYTKALLAYAFALAGNQDKRKEVLKSLNEEAVKKDNSVHWERPQKPKAPVGHFYEPQAPSAEVEMTSYVLLAYLTAQPAPTSEDLTSATNIVKWITKQQNAQGGFSSTQDTVVALHALSKYGAATFTRTGKAAQVTIQSSGTFSSKFQVDNNNRLLLQQVSLPELPGEYSMKVTGEGCVYLQTSLKYNILPEKEEFPFALGVQTLPQTCDEPKAHTSFQISLSVSYTGSRSASNMAIVDVKMVSGFIPLKPTVKMLERSNHVSRTEVSSNHVLIYLDKVSNQTLSLFFTVLQDVPVRDLKPAIVKVYDYYETDEFAIAEYNAPCSKDLGNA

SEQ ID NO: 3 - protein, 201 aa, Homo sapiens
  CARBOHYD 103: note = N is linked to glycan structure Hex(7)HexNAc(6)Fuc(0)NeuAc(3)
  CARBOHYD 72: note = N is linked to glycan structure Hex(6)HexNAc(5)Fuc(1)NeuAc(3)
MALSWVLTVLSLLPLLEAQIPLCANLVPVPITNATLDQITGKWFYIASAFRNEEYNKSVQEIQATFFYFTPNKTEDTIFLREYQTRQDQCIYNTTYLNVQRENGTISRYVGGQEHFAHLLILRDTKTYMLAFDVNDEKNWGLSVYADKPETTKEQLGEFYEALDCLRIPKSDVVYTDWKKDKCEPLEKQHEKERKQEEGES

SEQ ID NO: 4 - protein, 462 aa, Homo sapiens
  CARBOHYD 187: note = N is linked to glycan structure Hex(5)HexNAc(4)Fuc(1)NeuAc(2)
MARVLGAPVALGLWSLCWSLAIATPLPPTSAHGNVAEGETKPDPDVTERCSDGWSFDATTLDDNGTMLFFKGEFVWKSHKWDRELISERWKNFPSPVDAAFRQGHNSVFLIKGDKVWVYPPEKKEKGYPKLLQDEFPGIPSPLDAAVECHRGECQAEGVLFFQGDREWFWDLATGTMKERSWPAVGNCSSALRWLGRYYCFQGNQFLRFDPVRGEVPPRYPRDVRDYFMPCPGRGHGHRNGTGHGNSTHHGPEYMRCSPHLVLSALTSDNHGATYAFSGTHYWRLDTSRDGWHSWPIAHQWPQGPSAVDAAFSWEEKLYLVQGTQVYVFLTKGGYTLVSGYPKRLEKEVGTPHGIILDSVDAAFICPGSSRLHIMAGRRLWWLDLKSGAQATWTELPWPHEKVDGALCMEKSLGPNSCSANGPGLYLIHGPNLYCYSDVEKLNAAKALPQPQNVTSLLGCTH

SEQ ID NO: 5 - protein, 406 aa, Homo sapiens
  CARBOHYD 184: note = N is linked to glycan structure Hex(5)HexNAc(4)Fuc(1)NeuAc(2)
  CARBOHYD 207: note = N is linked to glycan structure Hex(5)HexNAc(4)Fuc(0)NeuAc(1)
  CARBOHYD 211: note = N is linked to glycan structure Hex(5)HexNAc(4)Fuc(0)NeuAc(2)
  CARBOHYD 207: note = N is linked to glycan structure Hex(5)HexNAc(4)Fuc(0)NeuAc(2)
  CARBOHYD 211: note = N is linked to glycan structure Hex(6)HexNAc(5)Fuc(0)NeuAc(2)
  CARBOHYD 207: note = N is linked to glycan structure Hex(6)HexNAc(5)Fuc(0)NeuAc(2)
  CARBOHYD 211: note = N is linked to glycan structure Hex(6)HexNAc(5)Fuc(1)NeuAc(3)
  CARBOHYD 241: note = N is linked to glycan structure Hex(5)HexNAc(4)Fuc(1)NeuAc(2)
  CARBOHYD 241: note = N is linked to glycan structure Hex(6)HexNAc(5)Fuc(1)NeuAc(3)
MSALGAVIALLLWGQLFAVDSGNDVTDIADDGCPKPPEIAHGYVEHSVRYQCKNYYKLRTEGDGVYTLNDKKQWINKAVGDKLPECEADDGCPKPPEIAHGYVEHSVRYQCKNYYKLRTEGDGVYTLNNEKQWINKAVGDKLPECEAVCGKPKNPANPVQRILGGHLDAKGSFPWQAKMVSHHNLTTGATLINEQWLLTTAKNLFLNHSENATAKDIAPTLTLYVGKKQLVEIEKVVLHPNYSQVDIGLIKLKQKVSVNERVMPICLPSKDYAEVGRVGYVSGWGRNANFKFTDHLKYVMLPVADQDQCIRHYEGSTVPEKKTPKSPVGVQPILNEHTFCAGMSKYQEDTCYGDAGSAFAVHDLEEDTWYATGILSFDKSCAVAEYGVYVKVTSIQDWVQKTIAEN

SEQ ID NO: 6 - protein, 30 aa, synthetic construct
  CARBOHYD 7: note = N is linked to glycan structure Hex(5)HexNAc(4)Fuc(1)NeuAc(2)
QLAHQSNSTNIFFSPVSIATAFAMLSLGTK

SEQ ID NO: 7 - protein, 7 aa, synthetic construct
  CARBOHYD 2: note = N is linked to glycan structure Hex(7)HexNAc(6)Fuc(0)NeuAc(3)
ENGTISR

SEQ ID NO: 8 - protein, 13 aa, synthetic construct
  CARBOHYD 7: note = N is linked to glycan structure Hex(5)HexNAc(4)Fuc(1)NeuAc(2)
SWPAVGNCSSALR

SEQ ID NO: 9 - protein, 24 aa, synthetic construct
  CARBOHYD 6: note = N is linked to glycan structure Hex(5)HexNAc(4)Fuc(1)NeuAc(2)
MVSHHNLTTGATLINEQWLLTTAK

SEQ ID NO: 10 - protein, 13 aa, synthetic construct
  CARBOHYD 5: note = N is linked to glycan structure Hex(5)HexNAc(4)Fuc(0)NeuAc(1)
  CARBOHYD 9: note = N is linked to glycan structure Hex(5)HexNAc(4)Fuc(0)NeuAc(2)
NLFLNHSENATAK

SEQ ID NO: 11 - protein, 13 aa, synthetic construct
  CARBOHYD 5: note = N is linked to glycan structure Hex(5)HexNAc(4)Fuc(0)NeuAc(2)
  CARBOHYD 9: note = N is linked to glycan structure Hex(6)HexNAc(5)Fuc(0)NeuAc(2)
NLFLNHSENATAK

SEQ ID NO: 12 - protein, 13 aa, synthetic construct
  CARBOHYD 5: note = N is linked to glycan structure Hex(6)HexNAc(5)Fuc(0)NeuAc(2)
  CARBOHYD 9: note = N is linked to glycan structure Hex(6)HexNAc(5)Fuc(1)NeuAc(3)
NLFLNHSENATAK

SEQ ID NO: 13 - protein, 16 aa, synthetic construct
  CARBOHYD 6: note = N is linked to glycan structure Hex(5)HexNAc(4)Fuc(1)NeuAc(2)
VVLHPNYSQVDIGLIK

SEQ ID NO: 14 - protein, 99 aa, Homo sapiens
MQPRVLLVVALLALLASARASEAEDASLLSFMQGYMKHATKTAKDALSSVQESQVAQQARGWVTDGFSSLKDYWSTVKDKFSEFWDLDPEVRPTSAVAA

SEQ ID NO: 15 - protein, 1474 aa, Homo sapiens; identical to SEQ ID NO: 2

SEQ ID NO: 16 - protein, 1065 aa, Homo sapiens
MKILILGIFLFLCSTPAWAKEKHYYIGIIETTWDYASDHGEKKLISVDTEHSNIYLQNGPDRIGRLYKKALYLQYTDETFRTTIEKPVWLGFLGPIIKAETGDKVYVHLKNLASRPYTFHSHGITYYKEHEGAIYPDNTTDFQRADDKVYPGEQYTYMLLATEEQSPGEGDGNCVTRIYHSHIDAPKDIASGLIGPLIICKKDSLDKEKEKHIDREFVVMFSVVDENFSWYLEDNIKTYCSEPEKVDKDNEDFQESNRMYSVNGYTFGSLPGLSMCAEDRVKWYLFGMGNEVDVHAAFFHGQALTNKNYRIDTINLFPATLFDAYMVAQNPGEWMLSCQNLNHLKAGLQAFFQVQECNKSSSKDNIRGKHVRHYYIAAEEIIWNYAPSGIDIFTKENLTAPGSDSAVFFEQGTTRIGGSYKKLVYREYTDASFTNRKERGPEEEHLGILGPVIWAEVGDTIRVTFHNKGAYPLSIEPIGVRFNKNNEGTYYSPNYNPQSRSVPPSASHVAPTETFTYEWTVPKEVGPTNADPVCLAKMYYSAVDPTKDIFTGLIGPMKICKKGSLHANGRQKDVDKEFYLFPTVFDENESLLLEDNIRMFTTAPDQVDKEDEDFQESNKMHSMNGFMYGNQPGLTMCKGDSVVWYLFSAGNEADVHGIYFSGNTYLWRGERRDTANLFPQTSLTLHMWPDTEGTFNVECLTTDHYTGGMKQKYTVNQCRRQSEDSTFYLGERTYYIAAVEVEWDYSPQREWEKELHHLQEQNVSNAFLDKGEFYIGSKYKKVVYRQYTDSTFRVPVERKAEEEHLGILGPQLHADVGDKVKIIFKNMATRPYSIHAHGVQTESSTVTPTLPGETLTYVWKIPERSGAGTEDSACIPWAYYSTVDQVKDLYSGLIGPLIVCRRPYLKVFNPRRKLEFALLFLVFDENESWYLDDNIKTYSDHPEKVNKDDEEFIESNKMHAINGRMFGNLQGLTMHVGDEVNWYLMGMGNEIDLHTVHFHGHSFQYKHRGVYSSDVFDIFPGTYQTLEMFPRTPGIWLLHCHVTDHIHAGMETTYTVLQNEDTKSG

SEQ ID NO: 17 - protein, 201 aa, Homo sapiens; identical to SEQ ID NO: 3

SEQ ID NO: 18 - protein, 406 aa, Homo sapiens; identical to SEQ ID NO: 5

SEQ ID NO: 19 - protein, 462 aa, Homo sapiens; identical to SEQ ID NO: 4

SEQ ID NO: 20 - protein, 345 aa, Homo sapiens
MISPVLILFSSFLCHVAIAGRTCPKPDDLPFSTVVPLKTFYEPGEEITYSCKPGYVSRGGMRKFICPLTGLWPINTLKCTPRVCPFAGILENGAVRYTTFEYPNTISFSCNTGFYLNGADSAKCTEEGKWSPELPVCAPIICPPPSIPTFATLRVYKPSAGNNSLYRDTAVFECLPQHAMFGNDTITCTTHGNWTKLPECREVKCPFPSRPDNGFVNYPAKPTLYYKDKATFGCHDGYSLDGPEEIECTKLGNWSAMPSCKASCKVPVKKATVVYQGERVKIQEKFKNGMLHGDKVSFFCKNKEKKCSYTEDAQCIDGTIEVPKCFKEHSSLAFWKTDASDVKPC

SEQ ID NO: 21 - protein, 13 aa, synthetic construct
RPAIAINNPYVPR

SEQ ID NO: 22 - protein, 12 aa, synthetic construct
FFVAPFPEVFGK

SEQ ID NO: 23 - protein, 423 aa, synthetic construct
  CARBOHYD 127: note = N is linked to glycan structure Hex(5)HexNAc(4)Fuc(0)NeuAc(1)
  CARBOHYD 127: note = N is linked to glycan structure Hex(5)HexNAc(4)Fuc(0)NeuAc(2)
  CARBOHYD 106: note = N is linked to glycan structure Hex(5)HexNAc(4)Fuc(0)NeuAc(2)
  CARBOHYD 106: note = N is linked to glycan structure Hex(6)HexNAc(5)Fuc(0)NeuAc(3)
  CARBOHYD 127: note = N is linked to glycan structure Hex(6)HexNAc(5)Fuc(0)NeuAc(3)
MERMLPLLALGLLAAGFCPAVLCHPNSPLDEENLTQENQDRGTHVDLGLASANVDFAFSLYKQLVLKAPDKNVIFSPLSISTALAFLSLGAHNTTLTEILKGLKFNLTETSEAEIHQSFQHLLRTLNQSSDELQLSMGNAMFVKEQLSLLDRFTEDAKRLYGSEAFATDFQDSAAAKKLINDYVKNGTRGKITDLIKDLDSQTMMVLVNYIFFKAKWEMPFDPQDTHQSRFYLSKKKWVMVPMMSLHHLTIPYFRDEELSCTVVELKYTGNASALFILPDQDKMEEVEAMLLPETLKRWRDSLEFREIGELYLPKFSISRDYNLNDILLQLGIEEAFTSKADLSGITGARNLAVSQVVHKAVLDVFEEGTEASAATAVKITLLSALVETRTIVRFNRPFLMIIVPTDTQNIFFMSKVTNPKQA

SEQ ID NO: 24 - protein, 449 aa, synthetic construct
  CARBOHYD 291: note = N is linked to glycan structure Hex(5)HexNAc(4)Fuc(0)NeuAc(1)
MMKTLLLFVGLLLTWESGQVLGDQTVSDNELQEMSNQGSKYVNKEIQNAVNGVKQIKTLIEKTNEERKTLLSNLEEAKKKKEDALNETRESETKLKELPGVCNETMMALWEECKPCLKQTCMKFYARVCRSGSGLVGRQLEEFLNQSSPFYFWMNGDRIDSLLENDRQQTHMLDVMQDHFSRASSIIDELFQDRFFTREPQDTYHYLPFSLPHRRPHFFFPKSRIVRSLMPFSPYEPLNFHAMFQPFLEMIHEAQQAMDIHFHSPAFQHPPTEFIREGDDDRTVCREIRHNSTGCLRMKDQCDKCREILSVDCSTNNPSQAKLRRELDESLQVAERLTRKYNELLKSYQWKMLNTSSLLEQLNEQFNWVSRLANLTQGEDQYYLRVTTVASHTSDSDVPSGVTEVVVKLFDSDPITVTVPVEVSRKNPKFMETVAEKALQEYRKKHREE

SEQ ID NO: 25 - protein, 638 aa, synthetic construct
  CARBOHYD 308: note = N is linked to glycan structure Hex(5)HexNAc(4)Fuc(0)NeuAc(1)
  CARBOHYD 494: note = N is linked to glycan structure Hex(5)HexNAc(4)Fuc(1)NeuAc(0)
  CARBOHYD 308: note = N is linked to glycan structure Hex(5)HexNAc(4)Fuc(0)NeuAc(2)
MILFKQATYFISLFATVSCGCLTQLYENAFFRGGDVASMYTPNAQYCQMRCTFHPRCLLFSFLPASSINDMEKRFGCFLKDSVTGTLPKVHRTGAVSGHSLKQCGHQISACHRDIYKGVDMRGVNFNVSKVSSVEECQKRCTNNIRCQFFSYATQTFHKAEYRNNCLLKYSPGGTPTAIKVLSNVESGFSLKPCALSEIGCHMNIFQHLAFSDVDVARVLTPDAFVCRTICTYHPNCLFFTFYTNVWKIESQRNVCLLKTSESGTPSSSTPQENTISGYSLLTCKRTLPEPCHSKIYPGVDFGGEELNVTFVKGVNVCQETCTKMIRCQFFTYSLLPEDCKEEKCKCFLRLSMDGSPTRIAYGTQGSSGYSLRLCNTGDNSVCTTKTSTRIVGGTNSSWGEWPWQVSLQVKLTAQRHLCGGSLIGHQWVLTAAHCFDGLPLQDVWRIYSGILNLSDITKDTPFSQIKEIIIHQNYKVSEGNHDIALIKLQAPLNYTEFQKPICLPSKGDTSTIYTNCWVTGWGFSKEKGEIQNILQKVNIPLVTNEECQKRYQDYKITQRMVCAGYKEGGKDACKGDSGGPLVCKHNGMWRLVGITSWGEGCARREQPGVYTKVAEYMDWILEKTQSSDGKAQMQSPA

SEQ ID NO: 26 - protein, 644 aa, synthetic construct
  CARBOHYD 205: note = N is linked to glycan structure Hex(6)HexNAc(5)Fuc(1)NeuAc(3)
MKLITILFLCSRLLLSLTQESQSEEIDCNDKDLFKAVDAALKKYNSQNQSNNQFVLYRITEATKTVGSDTFYSFKYEIKEGDCPVQSGKTWQDCEYKDAAKAATGECTATVGKRSSTKFSVATQTCQITPAEGPVVTAQYDCLGCVHPISTQSPDLEPILRHGIQYFNNNTQHSSLFMLNEVKRAQRQVVAGLNFRITYSIVQTNCSKENFLFLTPDCKSLWNGDTGECTDNAYIDIQLRIASFSQNCDIYPGKDFVQPPTKICVGCPRDIPTNSPELEETLTHTITKLNAENNATFYFKIDNVKKARVQVVAGKKYFIDFVARETTCSKESNEELTESCETKKLGQSLDCNAEVYVVPWEKKIYPTVNCQPLGMISLMKRPPGFSPFRSSRIGEIKEETTVSPPHTSMAPAQDEERDSGKEQGHTRRHDWGHEKQRKHNLGHGHKHERDQGHGHQRGHGLGHGHEQQHGLGHGHKFKLDDDLEHQGGHVLDHGHKHKHGHGHGKHKNKGKKNGKHNGWKTEHLASSSEDSTTPSAQTQEKTEGPTPIPSLAKPGVTVTFSDFQDSDLIATMMPPISPAPIQSDDDWIPDIQIDPNGLSFNPISDFPDTTSPKCPGRPWKSVSEINPTTQMKESYYFDLTDGLS

SEQ ID NO: 27 - protein, 478 aa, synthetic construct
  CARBOHYD 242: note = N is linked to glycan structure Hex(6)HexNAc(5)Fuc(0)NeuAc(3)
  CARBOHYD 242: note = N is linked to glycan structure Hex(6)HexNAc(5)Fuc(1)NeuAc(3)
MAPLRPLLILALLAWVALADQESCKGRCTEGFNVDKKCQCDELCSYYQSCCTDYTAECKPQVTRGDVFTMPEDEYTVYDDGEEKNNATVHEQVGGPSLTSDLQAQSKGNPEQTPVLKPEEEAPAPEVGASKPEGIDSRPETLHPGRPQPPAEEELCSGKPFDAFTDLKNGSLFAFRGQYCYELDEKAVRPGYPKLIRDVWGIEGPIDAAFTRINCQGKTYLFKGSQYWRFEDGVLDPDYPRNISDGFDGIPDNVDAALALPAHSYSGRERVYFFKGKQYWEYQFQHQPSQEECEGSSLSAVFEHFAMMQRDSWEDIFELLFWGRTSAGTRQPQFISRDWHGVPGQVDAAMAGRIYISGMAPRPSLAKKQRFRHRNRKGYRSQRGHSRGRNQNSRRPSRATWLSLFSSEESNLGANNYDDYRMDWLVPATCEPIQSVFFFSGDKYYRVNLRTRRVDTVDPPYPRSIAQYWLGCPAPGHL

SEQ ID NO: 28 - protein, 1474 aa, synthetic construct; identical to SEQ ID NO: 2
  CARBOHYD 869: note = N is linked to glycan structure Hex(5)HexNAc(2)Fuc(0)NeuAc(0)

SEQ ID NO: 29 - protein, 201 aa, synthetic construct; identical to SEQ ID NO: 3
  CARBOHYD 72: note = N is linked to glycan structure Hex(6)HexNAc(5)Fuc(0)NeuAc(3)
  CARBOHYD 72: note = N is linked to glycan structure Hex(7)HexNAc(6)Fuc(0)NeuAc(2)
  CARBOHYD 72: note = N is linked to glycan structure Hex(6)HexNAc(5)Fuc(1)NeuAc(3)
  CARBOHYD 72: note = N is linked to glycan structure Hex(7)HexNAc(6)Fuc(1)NeuAc(3)

SEQ ID NO: 30 - protein, 99 aa, synthetic construct; identical to SEQ ID NO: 14
  CARBOHYD 94: note = T is linked to glycan structure Hex(1)HexNAc(1)Fuc(0)NeuAc(1)

SEQ ID NO: 31 - protein, 1065 aa, synthetic construct; identical to SEQ ID NO: 16
  CARBOHYD 762: note = N is linked to glycan structure Hex(6)HexNAc(5)Fuc(1)NeuAc(3)

SEQ ID NO: 32 - protein, 406 aa, synthetic construct; identical to SEQ ID NO: 5
  CARBOHYD 184: note = N is linked to glycan structure Hex(5)HexNAc(4)Fuc(1)NeuAc(2)
  CARBOHYD 207: note = N is linked to glycan structure Hex(5)HexNAc(4)Fuc(0)NeuAc(1)
  CARBOHYD 211: note = N is linked to glycan structure Hex(5)HexNAc(4)Fuc(0)NeuAc(2)
  CARBOHYD 207: note = N is linked to glycan structure Hex(5)HexNAc(4)Fuc(0)NeuAc(2)
  CARBOHYD 211: note = N is linked to glycan structure Hex(6)HexNAc(5)Fuc(0)NeuAc(2)
  CARBOHYD 207: note = N is linked to glycan structure Hex(6)HexNAc(5)Fuc(0)NeuAc(2)
  CARBOHYD 211: note = N is linked to glycan structure Hex(6)HexNAc(5)Fuc(1)NeuAc(3)
  CARBOHYD 241: note = N is linked to glycan structure Hex(5)HexNAc(4)Fuc(1)NeuAc(2)
  CARBOHYD 241: note = N is linked to glycan structure Hex(6)HexNAc(5)Fuc(1)NeuAc(3)

SEQ ID NO: 33 - protein, 500 aa, synthetic construct
  CARBOHYD 352: note = N is linked to glycan structure Hex(5)HexNAc(4)Fuc(0)NeuAc(2)
MASRLTLLTLLLLLLAGDRASSNPNATSSSSQDPESLQDRGEGKVATTVISKMLFVEPILEVSSLPTTNSTTNSATKITANTTDEPTTQPTTEPTTQPTIQPTQPTTQLPTDSPTQPTTGSFCPGPVTLCSDLESHSTEAVLGDALVDFSLKLYHAFSAMKKVETNMAFSPFSIASLLTQVLLGAGENTKTNLESILSYPKDFTCVHQALKGFTTKGVTSVSQIFHSPDLAIRDTFVNASRTLYSSSPRVLSNNSDANLELINTWVAKNTNNKISRLLDSLPSDTRLVLLNAIYLSAKWKTTFDPKKTRMEPFHFKNSVIKVPMMNSKKYPVAHFIDQTLKAKVGQLQLSHNLSLVILVPQNLKHRLEDMEQALSPSVFKAIMEKLEMSKFQPTLLTLPRIKVTTSQDMLSIMEKLEFFDFSYDLNLCGLTEDPDLQVSAMQHQTVLELTETGVEAAAASAISVARTLLVFEVQQPFLFVLWDQQHKFPVFMGRVYDPRA

SEQ ID NO: 34 - protein, 326 aa, synthetic construct
  CARBOHYD 176: note = N is linked to glycan structure Hex(5)HexNAc(4)Fuc(0)NeuAc(1)
  CARBOHYD 297: note = Q is linked to glycan structure Hex(5)HexNAc(4)Fuc(0)NeuAc(1)
ASTKGPSVFPLAPCSRSTSESTAALGCLVKDYFPEPVTVSWNSGALTSGVHTFPAVLQSSGLYSLSSVVTVPSSNFGTQTYTCNVDHKPSNTKVDKTVERKCCVECPPCPAPPVAGPSVFLFPPKPKDTLMISRTPEVTCVVVDVSHEDPEVQFNWYVDGVEVHNAKTKPREEQFNSTFRVVSVLTVVHQDWLNGKEYKCKVSNKGLPAPIEKTISKTKGQPREPQVYTLPPSREEMTKNQVSLTCLVKGFYPSDISVEWESNGQPENNYKTTPPMLDSDGSFFLYSKLTVDKSRWQQGNVFSCSVMHEALHNHYTQKSLSLSPGK

SEQ ID NO: 35 - protein, 20 aa, synthetic construct
  CARBOHYD 3: note = N is linked to glycan structure Hex(5)HexNAc(4)Fuc(0)NeuAc(1)
TLNQSSDELQLSMGNAMFVK

SEQ ID NO: 36 - protein, 20 aa, synthetic construct
  CARBOHYD 3: note = N is linked to glycan structure Hex(5)HexNAc(4)Fuc(0)NeuAc(2)
TLNQSSDELQLSMGNAMFVK

SEQ ID NO: 37 - protein, 16 aa, synthetic construct
  CARBOHYD 4: note = N is linked to glycan structure Hex(6)HexNAc(5)Fuc(0)NeuAc(3)
YTGNASALFILPDQDK

SEQ ID NO: 38 - protein, 8 aa, synthetic construct
  CARBOHYD 2: note = N is linked to glycan structure Hex(5)HexNAc(4)Fuc(0)NeuAc(1)
HNSTGCLR

SEQ ID NO: 39 - protein, 18 aa, synthetic construct
  CARBOHYD 13: note = N is linked to glycan structure Hex(5)HexNAc(4)Fuc(0)NeuAc(2)
IYPGVDFGGEELNVTFVK

SEQ ID NO: 40 - protein, 12 aa, synthetic construct
  CARBOHYD 9: note = N is linked to glycan structure Hex(6)HexNAc(5)Fuc(1)NeuAc(3)
ITYSIVQTNCSK

SEQ ID NO: 41 - protein, 27 aa, synthetic construct
  CARBOHYD 1: note = N is linked to glycan structure Hex(6)HexNAc(5)Fuc(0)NeuAc(3)
NISDGFDGIPDNVDAALALPAHSYSGR

SEQ ID NO: 42 - protein, 27 aa, synthetic construct
  CARBOHYD 1: note = N is linked to glycan structure Hex(6)HexNAc(5)Fuc(1)NeuAc(3)
NISDGFDGIPDNVDAALALPAHSYSGR

SEQ ID NO: 43 - protein, 17 aa, synthetic construct
  CARBOHYD 9: note = N is linked to glycan structure Hex(6)HexNAc(5)Fuc(1)NeuAc(3)
ELHHLQEQNVSNAFLDK

SEQ ID NO: 44 - protein, 16 aa, synthetic construct
  CARBOHYD 15: note = N is linked to glycan structure Hex(6)HexNAc(5)Fuc(1)NeuAc(3)
SVQEIQATFFYFTPNK

SEQ ID NO: 45 - protein, 9 aa, synthetic construct
  CARBOHYD 5: note = N is linked to glycan structure Hex(5)HexNAc(4)Fuc(1)NeuAc(0)
EEQFNSTFR

SEQ ID NO: 46 - protein, 32 aa, synthetic construct
  CARBOHYD 6: note = N is linked to glycan structure Hex(5)HexNAc(2)Fuc(0)NeuAc(0)
SLGNVNFTVSAEALESQELCGTEVPSVPEHGR

SEQ ID NO: 47 - protein, 20 aa, synthetic construct
  CARBOHYD 2: note = N is linked to glycan structure Hex(5)HexNAc(4)Fuc(0)NeuAc(2)
FNLTETSEAEIHQSFQHLLR

SEQ ID NO: 48 - protein, 19 aa, synthetic construct
  CARBOHYD 14: note = T is linked to glycan structure Hex(1)HexNAc(1)Fuc(0)NeuAc(1)
FSEFWDLDPEVRPTSAVAA

SEQ ID NO: 49 - protein, 21 aa, synthetic construct
  CARBOHYD 9: note = N is linked to glycan structure Hex(5)HexNAc(4)Fuc(0)NeuAc(2)
VGQLQLSHNLSLVILVPQNLK

SEQ ID NO: 50 - protein, 16 aa, synthetic construct
  CARBOHYD 6: note = N is linked to glycan structure Hex(6)HexNAc(5)Fuc(1)NeuAc(3)
VVLHPNYSQVDIGLIK

SEQ ID NO: 51 - protein, 16 aa, synthetic construct
  CARBOHYD 15: note = N is linked to glycan structure Hex(7)HexNAc(6)Fuc(1)NeuAc(3)
SVQEIQATFFYFTPNK

SEQ ID NO: 52-113 - skipped (62 entries)

SEQ ID NO: 114 - protein, 99 aa, Homo sapiens; identical to SEQ ID NO: 14

SEQ ID NO: 115-151 - skipped (37 entries)

SEQ ID NO: 152 - protein, 698 aa, Homo sapiens
  CARBOHYD 360: note = P is linked to Fucose
  CARBOHYD 630: note = N is linked to Fucose
MRLAVGALLVCAVLGLCLAVPDKTVRWCAVSEHEATKCQSFRDHMKSVIPSDGPSVACVKKASYLDCIRAIAANEADAVTLDAGLVYDAYLAPNNLKPVVAEFYGSKEDPQTFYYAVAVVKKDSGFQMNQLRGKKSCHTGLGRSAGWNIPIGLLYCDLPEPRKPLEKAVANFFSGSCAPCADGTDFPQLCQLCPGCGCSTLNQYFGYSGAFKCLKDGAGDVAFVKHSTIFENLANKADRDQYELLCLDNTRKPVDEYKDCHLAQVPSHTVVARSMGGKEDLIWELLNQAQEHFGKDKSKEFQLFSSPHGKDLLFKDSAHGFLKVPPRMDAKMYLGYEYVTAIRNLREGTCPEAPTDECKPVKWCALSHHERLKCDEWSVNSVGKIECVSAETTEDCIAKIMNGEADAMSLDGGFVYIAGKCGLVPVLAENYNKSDNCEDTPEAGYFAVAVVKKSASDLTWDNLKGKKSCHTAVGRTAGWNIPMGLLYNKINHCRFDEFFSEGCAPGSKKDSSLCKLCMGSGLNLCEPNNKEGYYGYTGAFRCLVEKGDVAFVKHQTVPQNTGGKNPDPWAKNLNEKDYELLCLDGTRKPVEEYANCHLARAPNHAVVTRKDKEACVHKILRQQQHLFGSNVTDCSGNFCLFRSETKDLLFRDDTVCLAKLHDRNTYEKYLGEEYVKAVGNLRKCSTSSLLEACTFRRP

SEQ ID NO: 153-173 - skipped (21 entries)

SEQ ID NO: 174 - protein, 201 aa, Homo sapiens; identical to SEQ ID NO: 3

SEQ ID NO: 175-184 - skipped (10 entries)

SEQ ID NO: 185 - protein, 406 aa, Homo sapiens; identical to SEQ ID NO: 5

SEQ ID NO: 186-195 - skipped (10 entries)

SEQ ID NO: 196 - protein, 462 aa, Homo sapiens; identical to SEQ ID NO: 4

SEQ ID NO: 197-206 - skipped (10 entries)

SEQ ID NO: 207 - protein, 345 aa, Homo sapiens; identical to SEQ ID NO: 20

SEQ ID NO: 208-214 - skipped (7 entries)

SEQ ID NO: 215 - protein, 1474 aa, Homo sapiens; identical to SEQ ID NO: 2

SEQ ID NO: 216-217 - skipped (2 entries)

SEQ ID NO: 218 - protein, 13 aa, synthetic construct
RPAIAINNPYVPR

SEQ ID NO: 219-228 - skipped (10 entries)

SEQ ID NO: 229 - protein, 12 aa, synthetic construct
FFVAPFPEVFGK

SEQ ID NO: 230-252 - skipped (23 entries)

SEQ ID NO: 253 - protein, 1231 aa, Homo sapiens
  CARBOHYD 882: note = N is linked to Fucose
  CARBOHYD 882: note = N is linked to Hex(5)HexNAc(4)Fuc(1)NeuAc(1)
MRLLAKIICLMLWAICVAEDCNELPPRRNTEILTGSWSDQTYPEGTQAIYKCRPGYRSLGNVIMVCRKGEWVALNPLRKCQKRPCGHPGDTPFGTFTLTGGNVFEYGVKAVYTCNEGYQLLGEINYRECDTDGWTNDIPICEVVKCLPVTAPENGKIVSSAMEPDREYHFGQAVRFVCNSGYKIEGDEEMHCSDDGFWSKEKPKCVEISCKSPDVINGSPISQKIIYKENERFQYKCNMGYEYSERGDAVCTESGWRPLPSCEEKSCDNPYIPNGDYSPLRIKHRTGDEITYQCRNGFYPATRGNTAKCTSTGWIPAPRCTLKPCDYPDIKHGGLYHENMRRPYFPVAVGKYYSYYCDEHFETPSGSYWDHIHCTQDGWSPAVPCLRKCYFPYLENGYNQNYGRKFVQGKSIDVACHPGYALPKAQTTVTCMENGWSPTPRCIRVKTCSKSSIDIENGFISESQYTYALKEKAKYQCKLGYVTADGETSGSITCGKDGWSAQPTCIKSCDIPVFMNARTKNDFTWFKLNDTLDYECHDGYESNTGSTTGSIVCGYNGWSDLPICYERECELPKIDVHLVPDRKKDQYKVGEVLKFSCKPGFTIVGPNSVQCYHFGLSPDLPICKEQVQSCGPPPELLNGNVKEKTKEEYGHSEVVEYYCNPRFLMKGPNKIQCVDGEWTTLPVCIVEESTCGDIPELEHGWAQLSSPPYYYGDSVEFNCSESFTMIGHRSITCIHGVWTQLPQCVAIDKLKKCKSSNLIILEEHLKNKKEFDHNSNIRYRCRGKEGWIHTVCINGRWDPEVNCSMAQIQLCPPPPQIPNSHNMTTTLNYRDGEKVSVLCQENYLIQEGEEITCKDGRWQSIPLCVEKIPCSQPPQIEHGTINSSRSSQESYAHGTKLSYTCEGGFRISEENETTCYMGKWSSPPQCEGLPCKSPPEISHGVVAHMSDSYQYGEEVTYKCFEGFGIDGPAIAKCLGEKWSHPPSCIKTDCLSLPSFENAIPMGEKKDVYKAGEQVTYTCATYYKMDGASNVTCINSRWTGRPTCRDTSCVNPPTVQNAYIVSRQMSKYPSGERVRYQCRSPYEMFGDEEVMCLNGNWTEPPQCKDSTGKCGPPPPIDNGDITSFPLSVYAPASSVEYQCQNLYQLEGNKRITCRNGQWSEPPKCLHPCVISREIMENYNIALRWTAKQKLYSRTGESVEFVCKRGYRLSSRSHTLRTTCWDGKLEYPTCAKR

SEQ ID NO: 254-315 - skipped (62 entries)

SEQ ID NO: 316 - protein, 1065 aa, Homo sapiens; identical to SEQ ID NO: 16

SEQ ID NO: 317-353 - skipped (37 entries)

SEQ ID NO: 354 - protein, 406 aa, Homo sapiens; identical to SEQ ID NO: 5
  CARBOHYD 207: note = N is linked to Fucose
  CARBOHYD 241: note = N is linked to Fucose
  CARBOHYD 184: note = N is linked to Fucose
  CARBOHYD 211: note = A is linked to glycan structure Hex(5)HexNAc(4)Fuc(0)NeuAc(2)
  CARBOHYD 211: note = A is linked to glycan structure Hex(6)HexNAc(5)Fuc(0)NeuAc(2)
  CARBOHYD 211: note = A is linked to glycan structure Hex(6)HexNAc(5)Fuc(1)NeuAc(3)
  CARBOHYD 184: note = N is linked to glycan structure  Hex(5)HexNAc(4)Fuc(1 )NeuAc(2)
  CARBOHYD 207: note = N is linked to glycan structure Hex(5)HexNAc(4)Fuc(0)NeuAc(1)
  CARBOHYD 207: note = N is linked to glycan structure  Hex(5)HexNAc(4)Fuc(0 )NeuAc(2)
  CARBOHYD 207: note = N is linked to glycan structure Hex(6)HexNAc(5)Fuc(0)NeuAc(2)
  CARBOHYD 241: note = N is linked to glycan structure Hex(5)HexNAc(4)Fuc(1)NeuAc(2)
  CARBOHYD 241: note = N is linked to glycan structure Hex(6)HexNAc(5)Fuc(1)NeuAc(3)

SEQ ID NO: 355-454 - skipped (100 entries)

SEQ ID NO: 455 - protein, 367 aa, Homo sapiens
  CARBOHYD 156: note = N is linked to Fucose
MKSLVLLLCLAQLWGCHSAPHGPGLIYRQPNCDDPETEEAALVAIDYINQNLPWGYKHTLNQIDEVKVWPQQPSGELFEIEIDTLETTCHVLDPTPVARCSVRQLKEHAVEGDCDFQLLKLDGKFSVVYAKCDSSPDSAEDVRKVCQDCPLLAPLNDTRVVHAAKAALAAFNAQNNGSNFQLEEISRAQLVPLPPSTYVEFTVSGTDCVAKEATEAAKCNLLAEKQYGFCKATLSEKLGGAEVAVTCMVFQTQPVSSQPQPEGANEAVPTPVVDPDAPPSPPLGAPGLPPAGSPPDSHVLLAAPPGHQLHRAHYDLRHTFMGVVSLGSPSGEVSHPRKTRTVVQPSVGAAAGPVVPPCPGRIRHFKV

SEQ ID NO: 456-493 - skipped (38 entries)

SEQ ID NO: 494 - protein, 2477 aa, Homo sapiens
MLRGPGPGLLLLAVQCLGTAVPSTGASKSKRQAQQMVQPQSPVAVSQSKPGCYDNGKHYQINQQWERTYLGNALVCTCYGGSRGFNCESKPEAEETCFDKYTGNTYRVGDTYERPKDSMIWDCTCIGAGRGRISCTIANRCHEGGQSYKIGDTWRRPHETGGYMLECVCLGNGKGEWTCKPIAEKCFDHAAGTSYVVGETWEKPYQGWMMVDCTCLGEGSGRITCTSRNRCNDQDTRTSYRIGDTWSKKDNRGNLLQCICTGNGRGEWKCERHTSVQTTSSGSGPFTDVRAAVYQPQPHPQPPPYGHCVTDSGVVYSVGMQWLKTQGNKQMLCTCLGNGVSCQETAVTQTYGGNSNGEPCVLPFTYNGRTFYSCTTEGRQDGHLWCSTTSNYEQDQKYSFCTDHTVLVQTRGGNSNGALCHFPFLYNNHNYTDCTSEGRRDNMKWCGTTQNYDADQKFGFCPMAAHEEICTTNEGVMYRIGDQWDKQHDMGHMMRCTCVGNGRGEWTCIAYSQLRDQCIVDDITYNVNDTFHKRHEEGHMLNCTCFGQGRGRWKCDPVDQCQDSETGTFYQIGDSWEKYVHGVRYQCYCYGRGIGEWHCQPLQTYPSSSGPVEVFITETPSQPNSHPIQWNAPQPSHISKYILRWRPKNSVGRWKEATIPGHLNSYTIKGLKPGVVYEGQLISIQQYGHQEVTRFDFTTTSTSTPVTSNTVTGETTPFSPLVATSESVTEITASSFVVSWVSASDTVSGFRVEYELSEEGDEPQYLDLPSTATSVNIPDLLPGRKYIVNVYQISEDGEQSLILSTSQTTAPDAPPDTTVDQVDDTSIVVRWSRPQAPITGYRIVYSPSVEGSSTELNLPETANSVTLSDLQPGVQYNITIYAVEENQESTPVVIQQETTGTPRSDTVPSPRDLQFVEVTDVKVTIMWTPPESAVTGYRVDVIPVNLPGEHGQRLPISRNTFAEVTGLSPGVTYYFKVFAVSHGRESKPLTAQQTTKLDAPTNLQFVNETDSTVLVRWTPPRAQITGYRLTVGLTRRGQPRQYNVGPSVSKYPLRNLQPASEYTVSLVAIKGNQESPKATGVFTTLQPGSSIPPYNTEVTETTIVITWTPAPRIGFKLGVRPSQGGEAPREVTSDSGSIVVSGLTPGVEYVYTIQVLRDGQERDAPIVNKVVTPLSPPTNLHLEANPDTGVLTVSWERSTTPDITGYRITTTPTNGQQGNSLEEVVHADQSSCTFDNLSPGLEYNVSVYTVKDDKESVPISDTIIPEVPQLTDLSFVDITDSSIGLRWTPLNSSTIIGYRITVVAAGEGIPIFEDFVDSSVGYYTVTGLEPGIDYDISVITLINGGESAPTTLTQQTAVPPPTDLRFTNIGPDTMRVTWAPPPSIDLTNFLVRYSPVKNEEDVAELSISPSDNAVVLTNLLPGTEYVVSVSSVYEQHESTPLRGRQKTGLDSPTGIDFSDITANSFTVHWIAPRATITGYRIRHHPEHFSGRPREDRVPHSRNSITLTNLTPGTEYVVSIVALNGREESPLLIGQQSTVSDVPRDLEVVAATPTSLLISWDAPAVTVRYYRITYGETGGNSPVQEFTVPGSKSTATISGLKPGVDYTITVYAVTGRGDSPASSKPISINYRTEIDKPSQMQVTDVQDNSISVKWLPSSSPVTGYRVTTTPKNGPGPTKTKTAGPDQTEMTIEGLQPTVEYVVSVYAQNPSGESQPLVQTAVTNIDRPKGLAFTDVDVDSIKIAWESPQGQVSRYRVTYSSPEDGIHELFPAPDGEEDTAELQGLRPGSEYTVSVVALHDDMESQPLIGTQSTAIPAPTDLKFTQVTPTSLSAQWTPPNVQLTGYRVRVTPKEKTGPMKEINLAPDSSSVVVSGLMVATKYEVSVYALKDTLTSRPAQGVVTTLENVSPPRRARVTDATETTITISWRTKTETITGFQVDAVPANGQTPIQRTIKPDVRSYTITGLQPGTDYKIYLYTLNDNARSSPVVIDASTAIDAPSNLRFLATTPNSLLVSWQPPRARITGYIIKYEKPGSPPREVVPRPRPGVTEATITGLEPGTEYTIYVIALKNNQKSEPLIGRKKTDELPQLVTLPHPNLHGPEILDVPSTVQKTPFVTHPGYDTGNGIQLPGTSGQQPSVGQQMIFEEHGFRRTTPPTTATPIRHRPRPYPPNVGEEIQIGHIPREDVDYHLYPHGPGLNPNASTGQEALSQTTISWAPFQDTSEYIISCHPVGTDEEPLQFRVPGTSTSATLTGLTRGATYNVIVEALKDQQRHKVREEVVTVGNSVNEGLNQPTDDSCFDPYTVSHYAVGDEWERMSESGFKLLCQCLGFGSGHFRCDSSRWCHDNGVNYKIGEKWDRQGENGQMMSCTCLGNGKGEFKCDPHEATCYDDGKTYHVGEQWQKEYLGAICSCTCFGGQRGWRCDNCRRPGGEPSPEGTTGQSYNQYSQRYHQRTNTNVNCPIECFMPLDVQADREDSRE

SEQ ID NO: 495-555 - skipped (61 entries)

SEQ ID NO: 556 - protein, 500 aa, Homo sapiens; identical to SEQ ID NO: 33
  CARBOHYD 253: note = N is linked to Fucose
  CARBOHYD 48: note = T is linked to Sialic Acid
  CARBOHYD 352: note = N is linked to glycan structure Hex(5)HexNAc(4)Fuc(0)NeuAc(2)

SEQ ID NO: 557-656 - skipped (100 entries)

SEQ ID NO: 657 - protein, 418 aa, Homo sapiens; identical to SEQ ID NO: 1
  CARBOHYD 70: note = N is linked to Fucose
  CARBOHYD 107: note = N is linked to glycan structure Hex(5)HexNAc(4)Fuc(1)NeuAc(2)
  CARBOHYD 107: note = N is linked to glycan structure Hex(6)HexNAc(5)Fuc(0)NeuAc(3)

SEQ ID NO: 658-757 - skipped (100 entries)

SEQ ID NO: 758 - protein, 462 aa, Homo sapiens; identical to SEQ ID NO: 4
  CARBOHYD 187: note = N is linked to Fucose
  CARBOHYD 187: note = N is linked to glycan structure Hex(5)HexNAc(4)Fuc(1)NeuAc(2)

SEQ ID NO: 759-959 - skipped (201 entries)

SEQ ID NO: 960 - protein, 1065 aa, Homo sapiens; identical to SEQ ID NO: 16
  CARBOHYD 762: note = N is linked to Fucose
  CARBOHYD 397: note = N is linked to Fucose
  CARBOHYD 138: note = N is linked to Fucose
  CARBOHYD 762: note = N is linked to glycan structure Hex(6)HexNAc(5)Fuc(1)NeuAc(3)

SEQ ID NO: 961-1060 - skipped (100 entries)

SEQ ID NO: 1061 - protein, 478 aa, Homo sapiens; identical to SEQ ID NO: 27
  CARBOHYD 242: note = N is linked to Fucose
  CARBOHYD 242: note = N is linked to glycan structure Hex(6)HexNAc(5)Fuc(0)NeuAc(3)
  CARBOHYD 242: note = N is linked to glycan structure Hex(6)HexNAc(5)Fuc(1)NeuAc(3)

SEQ ID NO: 1062-1161 - skipped (100 entries)

SEQ ID NO: 1162 - protein, 449 aa, Homo sapiens; identical to SEQ ID NO: 24
  CARBOHYD 86: note = N is linked to Sialic Acid
  CARBOHYD 291: note = N is linked to glycan structure Hex(5)HexNAc(4)Fuc(0)NeuAc(1)

SEQ ID NO: 1163-1262 - skipped (100 entries)

SEQ ID NO: 1263 - protein, 317 aa, Homo sapiens [sequence omitted]

SEQ ID NO: 1264-2575 - skipped (1312 entries)

SEQ ID NO: 2576 - protein, 345 aa, Homo sapiens; identical to SEQ ID NO: 20
  CARBOHYD 253: note = N is linked to Fucose

SEQ ID NO: 2577-3786 - skipped (1210 entries)

SEQ ID NO: 3787 - protein, 422 aa, Homo sapiens
  CARBOHYD 106: note = N is linked to glycan structure Hex(5)HexNAc(4)Fuc(0)NeuAc(2)
  CARBOHYD 106: note = N is linked to glycan structure Hex(6)HexNAc(5)Fuc(0)NeuAc(3)
  CARBOHYD 127: note = N is linked to glycan structure  Hex(5)HexNAc(4)Fuc(0 )NeuAc(1)
  CARBOHYD 127: note = N is linked to glycan structure   Hex(5)HexNAc(4)Fuc( 0)NeuAc(2)
  CARBOHYD 127: note = N is linked to glycan structure Hex(6)HexNAc(5)Fuc(0)NeuAc(3)
MERMLPLLALGLLAAGFCPAVLCHPNSPLDEENLTQENQDRGTHVDLGLASANVDFAFSLYKQLVLKAPDKNVIFSPLSISTALAFLSLGAHNTTLTEILKGLKFNLTETSEAEIHQSFQHLLRTLNQSSDELQLSMGNAMFVKEQLSLLDRFTEDAKRLYGSEAFATDFQDSAAAKKLINDYVKNGTRGKITDLIKDLDSQTMMVLVNYIFFKAKWEMPFDPQDTHQSRFYLSKKKWVMVPMMSLHHLTIPYFRDEELSCTVVELKYTGNASALFILPDQDKMEEVEAMLLPETLKRWRDSLEFREIGELYLPKFSISRDYNLNDILLQLGIEEAFTSKADLSGITGARNLAVSQVVHKAVLDVFEEGTEASAATAVKITLLSALVETRTIVRFNRPFLMIIVPTDTQNIFFMSKVTNPKQ

SEQ ID NO: 3788-3887 - skipped (100 entries)

SEQ ID NO: 3888 - protein, 4563 aa, Homo sapiens
  CARBOHYD 3411: note = N is linked to glycan structure Hex(5)HexNAc(4)Fuc(0)NeuAc(1)
MDPPRPALLALLALPALLLLLLAGARAEEEMLENVSLVCPKDATRFKHLRKYTYNYEAESSSGVPGTADSRSATRINCKVELEVPQLCSFILKTSQCTLKEVYGFNPEGKALLKKTKNSEEFAAAMSRYELKLAIPEGKQVFLYPEKDEPTYILNIKRGIISALLVPPETEEAKQVLFLDTVYGNCSTHFTVKTRKGNVATEISTERDLGQCDRFKPIRTGISPLALIKGMTRPLSTLISSSQSCQYTLDAKRKHVAEAICKEQHLFLPFSYKNKYGMVAQVTQTLKLEDTPKINSRFFGEGTKKMGLAFESTKSTSPPKQAEAVLKTLQELKKLTISEQNIQRANLFNKLVTELRGLSDEAVTSLLPQLIEVSSPITLQALVQCGQPQCSTHILQWLKRVHANPLLIDVVTYLVALIPEPSAQQLREIFNMARDQRSRATLYALSHAVNNYHKTNPTGTQELLDIANYLMEQIQDDCTGDEDYTYLILRVIGNMGQTMEQLTPELKSSILKCVQSTKPSLMIQKAAIQALRKMEPKDKDQEVLLQTFLDDASPGDKRLAAYLMLMRSPSQADINKIVQILPWEQNEQVKNFVASHIANILNSEELDIQDLKKLVKEALKESQLPTVMDFRKFSRNYQLYKSVSLPSLDPASAKIEGNLIFDPNNYLPKESMLKTTLTAFGFASADLIEIGLEGKGFEPTLEALFGKQGFFPDSVNKALYWVNGQVPDGVSKVLVDHFGYTKDDKHEQDMVNGIMLSVEKLIKDLKSKEVPEARAYLRILGEELGFASLHDLQLLGKLLLMGARTLQGIPQMIGEVIRKGSKNDFFLHYIFMENAFELPTGAGLQLQISSSGVIAPGAKAGVKLEVANMQAELVAKPSVSVEFVTNMGIIIPDFARSGVQMNTNFFHESGLEAHVALKAGKLKFIIPSPKRPVKLLSGGNTLHLVSTTKTEVIPPLIENRQSWSVCKQVFPGLNYCTSGAYSNASSTDSASYYPLTGDTRLELELRPTGEIEQYSVSATYELQREDRALVDTLKFVTQAEGAKQTEATMTFKYNRQSMTLSSEVQIPDFDVDLGTILRVNDESTEGKTSYRLTLDIQNKKITEVALMGHLSCDTKEERKIKGVISIPRLQAEARSEILAHWSPAKLLLQMDSSATAYGSTVSKRVAWHYDEEKIEFEWNTGTNVDTKKMTSNFPVDLSDYPKSLHMYANRLLDHRVPQTDMTFRHVGSKLIVAMSSWLQKASGSLPYTQTLQDHLNSLKEFNLQNMGLPDFHIPENLFLKSDGRVKYTLNKNSLKIEIPLPFGGKSSRDLKMLETVRTPALHFKSVGFHLPSREFQVPTFTIPKLYQLQVPLLGVLDLSTNVYSNLYNWSASYSGGNTSTDHFSLRARYHMKADSVVDLLSYNVQGSGETTYDHKNTFTLSYDGSLRHKFLDSNIKFSHVEKLGNNPVSKGLLIFDASSSWGPQMSASVHLDSKKKQHLFVKEVKIDGQFRVSSFYAKGTYGLSCQRDPNTGRLNGESNLRFNSSYLQGTNQITGRYEDGTLSLTSTSDLQSGIIKNTASLKYENYELTLKSDTNGKYKNFATSNKMDMTFSKQNALLRSEYQADYESLRFFSLLSGSLNSHGLELNADILGTDKINSGAHKATLRIGQDGISTSATTNLKCSLLVLENELNAELGLSGASMKLTTNGRFREHNAKFSLDGKAALTELSLGSAYQAMILGVDSKNIFNFKVSQEGLKLSNDMMGSYAEMKFDHTNSLNIAGLSLDFSSKLDNIYSSDKFYKQTVNLQLQPYSLVTTLNSDLKYNALDLTNNGKLRLEPLKLHVAGNLKGAYQNNEIKHIYAISSAALSASYKADTVAKVQGVEFSHRLNTDIAGLASAIDMSTNYNSDSLHFSNVFRSVMAPFTMTIDAHTNGNGKLALWGEHTGQLYSKFLLKAEPLAFTFSHDYKGSTSHHLVSRKSISAALEHKVSALLTPAEQTGTWKLKTQFNNNEYSQDLDAYNTKDKIGVELTGRTLADLTLLDSPIKVPLLLSEPINIIDALEMRDAVEKPQEFTIVAFVKYDKNQDVHSINLPFFETLQEYFERNRQTIIVVLENVQRNLKHINIDQFVRKYRAALGKLPQQANDYLNSFNWERQVSHAKEKLTALTKKYRITENDIQIALDDAKINFNEKLSQLQTYMIQFDQYIKDSYDLHDLKIAIANIIDEIIEKLKSLDEHYHIRVNLVKTIHDLHLFIENIDFNKSGSSTASWIQNVDTKYQIRIQIQEKLQQLKRHIQNIDIQHLAGKLKQHIEAIDVRVLLDQLGTTISFERINDILEHVKHFVINLIGDFEVAEKINAFRAKVHELIERYEVDQQIQVLMDKLVELAHQYKLKETIQKLSNVLQQVKIKDYFEKLVGFIDDAVKKLNELSFKTFIEDVNKFLDMLIKKLKSFDYHQFVDETNDKIREVTQRLNGEIQALELPQKAEALKLFLEETKATVAVYLESLQDTKITLIINWLQEALSSASLAHMKAKFRETLEDTRDRMYQMDIQQELQRYLSLVGQVYSTLVTYISDWWTLAAKNLTDFAEQYSIQDWAKRMKALVEQGFTVPEIKTILGTMPAFEVSLQALQKATFQTPDFIVPLTDLRIPSVQINFKDLKNIKIPSRFSTPEFTILNTFHIPSFTIDFVEMKVKIIRTIDQMLNSELQWPVPDIYLRDLKVEDIPLARITLPDFRLPEIAIPEFIIPTLNLNDFQVPDLHIPEFQLPHISHTIEVPTFGKLYSILKIQSPLFTLDANADIGNGTTSANEAGIAASITAKGESKLEVLNFDFQANAQLSNPKINPLALKESVKFSSKYLRTEHGSEMLFFGNAIEGKSNTVASLHTEKNTLELSNGVIVKINNQLTLDSNTKYFHKLNIPKLDFSSQADLRNEIKTLLKAGHIAWTSSGKGSWKWACPRFSDEGTHESQISFTIEGPLTSFGLSNKINSKHLRVNQNLVYESGSLNFSKLEIQSQVDSQHVGHSVLTAKGMALFGEGKAEFTGRHDAHLNGKVIGTLKNSLFFSAQPFEITASTNNEGNLKVRFPLRLTGKIDFLNNYALFLSPSAQQASWQVSARFNQYKYNQNFSAGNNENIMEAHVGINGEANLDFLNIPLTIPEMRLPYTIITTPPLKDFSLWEKTGLKEFLKTTKQSFDLSVKAQYKKNKHRHSITNPLAVLCEFISQSIKSFDRHFEKNRNNALDFVTKSYNETKIKFDKYKAEKSHDELPRTFQIPGYTVPVVNVEVSPFTIEMSAFGYVFPKAVSMPSFSILGSDVRVPSYTLILPSLELPVLHVPRNLKLSLPDFKELCTISHIFIPAMGNITYDFSFKSSVITLNTNAELFNQSDIVAHLLSSSSSVIDALQYKLEGTTRLTRKRGLKLATALSLSNKFVEGSHNSTVSLTTKNMEVSVATTTKAQIPILRMNFKQELNGNTKSKPTVSSSMEFKYDFNSSMLYSTAKGAVDHKLSLESLTSYFSIESSTKGDVKGSVLSREYSGTIASEANTYLNSKSTRSSVKLQGTSKIDDIWNLEVKENFAGEATLQRIYSLWEHSTKNHLQLEGLFFTNGEHTSKATLELSPWQMSALVQVHASQPSSFHDFPDLGQEVALNANTKNQKIRWKNEVRIHSGSFQSQVELSNDQEKAHLDIAGSLEGHLRFLKNIILPVYDKSLWDFLKLDVTTSIGRRQHLRVSTAFVYTKNPNGYSFSIPVKVLADKFIIPGLKLNDLNSVLVMPTFHVPFTDLQVPSCKLDFREIQIYKKLRTSSFALNLPTLPEVKFPEVDVLTKYSQPEDSLIPFFEITVPESQLTVSQFTLPKSVSDGIAALDLNAVANKIADFELPTIIVPEQTIEIPSIKFSVPAGIVIPSFQALTARFEVDSPVYNATWSASLKNKADYVETVLDSTCSSTVQFLEYELNVLGTHKIEDGTLASKTKGTFAHRDFSAEYEEDGKYEGLQEWEGKAHLNIKSPAFTDLHLRYQKDKKGISTSAASPAVGTVGMDMDEDDDFSKWNFYYSPQSSPDKKLTIFKTELRVRESDEETQIKVNWEEEAASGLLTSLKDNVPKATGVLYDYVNKYHWEHTGLTLREVSSKLRRNLQNNAEWVYQGAIRQIDDIDVRFQKAASGTTGTYQEWKDKAQNLYQELLTQEGQASFQGLKDNVFDGLVRVTQEFHMKVKHLIDSLIDFLNFPRFQFPGKPGIYTREELCTMFIREVGTVLSQVYSKVHNGSEILFSYFQDLVITLPFELRKHKLIDVISMYRELLKDLSKEAQEVFKAIQSLKTTEVLRNLQDLLQFIFQLIEDNIKQLKEMKFTYLINYIQDEINTIFSDYIPYVFKLLKENLCLNLHKFNEFIQNELQEASQELQQIHQYIMALREEYFDPSIVGWTVKYYELEEKIVSLIKNLLVALKDFHSEYIVSASNFTSQLSSQVEQFLHRNIQEYLSILTDPDGKGKEKIAELSATAQEIIKSQAIATKKIISDYHQQFRYKLQDFSDQLSDYYEKFIAESKRLIDLSIQNYHTFLIYITELLKKLQSTTVMNPYMKLAPGELTIIL

SEQ ID NO: 3889-3988 - skipped (100 entries)

SEQ ID NO: 3989 - protein, 188 aa, Homo sapiens
MFHQIWAALLYFYGIILNSIYQCPEHSQLTTLGVDGKEFPEVHLGQWYFIAGAAPTKEELATFDPVDNIVFNMAAGSAPMQLHLRATIRMKDGLCVPRKWIYHLTEGSTDLRTEGRPDMKTELFSSSCPGGIMLNETGQGYQRFLLYNRSPHPPEKCVEEFKSLTSCLDSKAFLLTPRNQEACELSNN

SEQ ID NO: 3990-4089 - skipped (100 entries)

SEQ ID NO: 4090 - protein, 330 aa, Homo sapiens [sequence omitted]

SEQ ID NO: 4091-4190 - skipped (100 entries)

SEQ ID NO: 4191 - protein, 326 aa, Homo sapiens; identical to SEQ ID NO: 34
  CARBOHYD 176: note = N is linked to glycan structure Hex(5)HexNAc(4)Fuc(0)NeuAc(1)
  CARBOHYD 297: note = Q is linked to glycan structure Hex(5)HexNAc(4)Fuc(1)NeuAc(0)

SEQ ID NO: 4192-4291 - skipped (100 entries)

SEQ ID NO: 4292 - protein, 638 aa, Homo sapiens; identical to SEQ ID NO: 25
  CARBOHYD 308: note = N is linked to glycan structure Hex(5)HexNAc(4)Fuc(0)NeuAc(1)
  CARBOHYD 494: note = N is linked to glycan structure Hex(5)HexNAc(4)Fuc(1)NeuAc(0)
  CARBOHYD 308: note = N is linked to glycan structure Hex(5)HexNAc(4)Fuc(0)NeuAc(2)

SEQ ID NO: 4293-4392 - skipped (100 entries)

SEQ ID NO: 4393 - protein, 638 aa, Homo sapiens; identical to SEQ ID NO: 25
  CARBOHYD 308: note = N is linked to glycan structure Hex(5)HexNAc(4)Fuc(0)NeuAc(1)
  CARBOHYD 494: note = N is linked to glycan structure Hex(5)HexNAc(4)Fuc(1)NeuAc(0)
  CARBOHYD 308: note = N is linked to glycan structure Hex(5)HexNAc(4)Fuc(0)NeuAc(2)

SEQ ID NO: 4394-4494 - skipped (101 entries)

SEQ ID NO: 4495 - protein, 32 aa, Homo sapiens
  CARBOHYD 14: note = N is linked to the glycan structure Hex(5)HexNAc(4)Fuc(1)NeuAc(2)
ADTHDEILEGLNFNLTEIPEAQIHEGFQELLR

SEQ ID NO: 4496-4595 - skipped (100 entries)

SEQ ID NO: 4596 - protein, 32 aa, Homo sapiens; identical to SEQ ID NO: 4495
  CARBOHYD 14: note = N is linked to glycan structure Hex(6)HexNAc(5)Fuc(0)NeuAc(3)

SEQ ID NO: 4597-4696 - skipped (100 entries)

SEQ ID NO: 4697 - protein, 20 aa, Homo sapiens
  CARBOHYD 2: note = N is linked to glycan structure Hex(6)HexNAc(5)Fuc(0)NeuAc(3)
FNLTETSEAEIHQSFQHLLR

SEQ ID NO: 4698-4797 - skipped (100 entries)

SEQ ID NO: 4798 - protein, 24 aa, Homo sapiens
  CARBOHYD 15: note = N is linked to glycan structure Hex(6)HexNAc(5)Fuc(0)NeuAc(3)
SVQEIQATFFYFTPNKTEDTIFLR

SEQ ID NO: 4799-4898 - skipped (100 entries)

SEQ ID NO: 4899 - protein, 24 aa, Homo sapiens
  CARBOHYD 15: note = N is linked to glycan structure Hex(7)HexNAc(6)Fuc(0)NeuAc(2)
SVQEIQATFFYFTPNKTEDTIFLR

SEQ ID NO: 4900-49099 - skipped (44200 entries)

SEQ ID NO: 49100 - protein, 15 aa, Homo sapiens
  CARBOHYD 7: note = N is linked to glycan structure Hex(5)HexNAc(4)Fuc(0)NeuAc(1)
FVEGSHNSTVSLTTK

SEQ ID NO: 49101-50100 - skipped (1000 entries)

SEQ ID NO: 50101 - protein, 23 aa, Homo sapiens
TELFSSSCPGGIMLNETGQGYQR

SEQ ID NO: 50102-51101 - skipped (1000 entries)

SEQ ID NO: 51102 - protein, 18 aa, Homo sapiens
  CARBOHYD 15: note = N is linked to glycan structure Hex(5)HexNAc(4)Fuc(1)NeuAc(1)
IPCSQPPQIEHGTINSSR

SEQ ID NO: 51103-52102 - skipped (1000 entries)

SEQ ID NO: 52103 - protein, 8 aa, Homo sapiens
  CARBOHYD 2: note = N is linked to glycan structure Hex(5)HexNAc(4)Fuc(0)NeuAc(1)
HNSTGCLR

SEQ ID NO: 52104-53103 - skipped (1000 entries)

SEQ ID NO: 53104 - protein, 9 aa, Homo sapiens
  CARBOHYD 5: note = N is linked to glycan structure Hex(5)HexNAc(4)Fuc(1)NeuAc(2)
EEQYNSTYR

SEQ ID NO: 53105-54104 - skipped (1000 entries)

SEQ ID NO: 54105 - protein, 9 aa, Homo sapiens
  CARBOHYD 5: note = N is linked to glycan structure Hex(5)HexNAc(4)Fuc(0)NeuAc(1)
EEQFNSTFR

SEQ ID NO: 54106-55105 - skipped (1000 entries)

SEQ ID NO: 55106 - protein, 18 aa, Homo sapiens
  CARBOHYD 13: note = N is linked to glycan structure Hex(5)HexNAc(4)Fuc(0)NeuAc(1)
IYPGVDFGGEELNVTFVK

SEQ ID NO: 55107-56106 - skipped (1000 entries)

SEQ ID NO: 56107 - protein, 19 aa, Homo sapiens
  CARBOHYD 6: note = N is linked to glycan structure Hex(5)HexNAc(4)Fuc(1)NeuAc(0)
LQAPLNYTEFQKPICLPSK

SEQ ID NO: 56108-57107 - skipped (1000 entries)

SEQ ID NO: 57108 - protein, 14 aa, Homo sapiens
SYTITGLQPGTDYK

SEQ ID NO: 57109 - protein, 201 aa, synthetic construct
MALSWVLTVLSLLPLLEAQIPLCANLVPVPITNATLDRITGKWFYIASAFRNEEYNKSVQEIQATFFYFTPNKTEDTIFLREYQTRQNQCFYNSSYLNVQRENGTVSRYEGGREHVAHLLFLRDTKTLMFGSYLDDEKNWGLSFYADKPETTKEQLGEFYEALDCLCIPRSDVMYTDWKKDKCEPLEKQHEKERKQEEGES

SEQ ID NO: 57110 - protein, 10 aa, synthetic construct
TGLQEVENVK

SEQ ID NO: 57111 - protein, 7 aa, synthetic construct
ECDMHYK

SEQ ID NO: 57112 - protein, 32 aa, synthetic construct
SVQEIQATFFYFTPNKTEDTIFLRMODIFIED

SEQ ID NO: 57113 - protein, 9 aa, synthetic construct
TGLQEVEVK

SEQ ID NO: 57114 - protein, 14 aa, synthetic construct
DSHSLTTNIMEILR

SEQ ID NO: 57115 - protein, 19 aa, synthetic construct
EEAPSLRPAPPPISGGGYR

SEQ ID NO: 57116 - protein, 13 aa, synthetic construct
YEASILTHDSSIR

SEQ ID NO: 57117 - protein, 17 aa, synthetic construct
VFDEFKPLVEEPQNLIK

SEQ ID NO: 57118 - protein, 29 aa, synthetic construct
AAAAAAAAAPAAAATAPTTAATTAATAAQ

SEQ ID NO: 57119 - protein, 11 aa, synthetic construct
AAAAAAALQAK

SEQ ID NO: 57120 - protein, 10 aa, synthetic construct
AAAAADLANR

SEQ ID NO: 57121 - protein, 17 aa, synthetic construct
AAAAAWEEPSSGNGTAR

SEQ ID NO: 57122 - protein, 47 aa, synthetic construct
AAAAGGAGGPGSGLAPLPGLPPSAAAHGAALLSHWDPTLSSDWDGER

SEQ ID NO: 57123 - protein, 12 aa, synthetic construct
GVPQPNITWLKR

What is claimed is:

1. A method for performing a liquid chromatography-mass spectrometry analysis of a proteolytic glycopeptide derived from a biological sample comprising a glycoprotein, the method comprising:
subjecting the biological sample to a thermal denaturation technique to produce a denatured sample followed by a proteolytic digestion technique to produce a proteolytically digested sample comprising the proteolytic glycopeptide,
wherein the thermal denaturation technique subjects the biological sample to a thermal cycle comprising a thermal treatment of about 60° C. to about 100° C. with a hold time of at least about 1 minute,
wherein a lid temperature during the thermal cycle is at least about 2° C. higher than a temperature of a block temperature during the thermal cycle,
wherein the proteolytic digestion technique comprises adding an amount of one or more proteolytic enzymes and incubating for a digestion incubation time, and
wherein the proteolytic digestion technique comprises quenching the one or more proteolytic enzymes following the digestion incubation time;
introducing the proteolytically digested sample to a liquid chromatography (LC) system of a LC-MS system; and
performing a LC-MS technique to introduce the proteolytic glycopeptide to a mass spectrometer (MS) system,
wherein the LC-MS technique comprises a period of diversion of an initial eluate comprising a salt, and
wherein the LC system comprises a reversed-phase chromatography column.

2. The method of claim 1, further comprising subjecting the denatured sample to a reduction technique followed by an alkylation technique prior to the proteolytic digestion technique.

3. The method of claim 2, wherein the reduction technique comprises subjecting the denatured sample to the reduction technique to produce a reduced sample,
wherein the reduction technique comprises adding an amount of a reducing agent to the denatured sample and incubating for a reducing incubation time.

4. The method of claim 2 or 3, wherein the alkylation technique comprises subjecting the reduced sample to the alkylation technique to produce an alkylated sample,
wherein the alkylation technique comprises adding an amount of an alkylating agent to the reduced sample and incubating substantially in in a low light condition for an alkylation incubation time, and
wherein the alkylated technique comprises quenching the alkylating agent following the alkylation incubation time.

5. A method for proteolytically digesting a biological sample comprising a glycoprotein to produce a proteolytic glycopeptide, the method comprising:
subjecting the biological sample to a thermal denaturation technique to produce a denatured sample,
wherein the thermal denaturation technique comprises subjecting the biological sample to a thermal cycle comprising a thermal treatment of about 60° C. to about 100° C. with a hold time of at least about 1 minute,
wherein a lid temperature during the thermal cycle is at least about 2° C. higher than a temperature of a block temperature during the thermal cycle;
subjecting the denatured sample to a reduction technique to produce a reduced sample, wherein the reduction technique comprises adding an amount of a reducing agent to the denatured sample and incubating for a reducing incubation time;
subjecting the reduced sample to an alkylation technique to produce an alkylated sample, wherein the alkylation technique comprises adding an amount of an alkylating agent to the reduced sample and incubating substantially in a dark or in a low light condition for an alkylation incubation time, and
wherein the alkylated technique comprises quenching the alkylating agent following the alkylation incubation time; and
subjecting the alkylated sample to a proteolytic digestion technique to produce a proteolytically digested sample comprising the proteolytic glycopeptide,
wherein the proteolytic digestion technique comprises adding an amount of one or more proteolytic enzymes and incubating for a digestion incubation time, and
wherein the proteolytic digestion technique comprises quenching the one or more proteolytic enzymes following the digestion incubation time.

6. The method of any one of claims 1-5, wherein the proteolytic glycopeptide comprises a hydrophilic glycan portion.

7. The method of any one of claims 1-5, wherein the proteolytic glycopeptide comprises a hydrophobic glycan portion.

8. The method of any one of claims 1-7, wherein the biological sample is derived from a human.

9. The method of any one of claims 1-8, wherein the biological sample is a blood sample or a derivative thereof.

10. The method of any one of claims 1-9, wherein the biological sample is a plasma sample.

11. The method of any one of claims 1-10, wherein the biological sample is a serum sample.

12. The method of any one of claims 1-11, wherein the biological sample is not subjected to a high-abundant protein depletion technique prior to the thermal denaturation technique.

13. The method of any one of claims 1-12, wherein the thermal cycle comprises a block set temperature of about 60° C. to about 100° C. with a hold time of at least about 1 minute.

14. The method of any one of claims 1-13, wherein the thermal cycle comprises a block ending temperature of about 15° C. to about 40° C.

15. The method of any one of claims 1-14, wherein the thermal cycle comprises a block starting temperature of about 15° C. to about 50° C.

16. The method of any one of claims 1-15, wherein the thermal cycle is performed in a thermal cycler comprising a lid temperature control element.

17. The method of any one of claims 1-16, wherein the thermal cycle comprises a ramp rate between the block set temperature and the block ending temperature of about 1° C./second to about 10° C./second.

18. The method of any one of claims 1-17, wherein the proteolytic digestion technique is performed at a temperature of about 20° C. to about 55° C.

19. The method of any one of claims 1-18, wherein the digestion incubation time is at least about 20 minutes.

20. The method of any one of claims 1-19, wherein the proteolytic digestion technique is performed at a temperature of about 37° C. for at least about 12 hours.

21. The method of any one of claims 18-20, wherein the proteolytic digestion technique is performed using a second thermal cycle,
wherein the lid temperature during the second thermal cycle is at least about 2° C. higher than the temperature of the block temperature during the second thermal cycle.

22. The method of claim 21, wherein the second thermal cycle is performed in a thermal cycler comprising a lid temperature control element.

23. The method of any one of claims 1-22, wherein each of the one or more proteolytic enzymes is selected from the group consisting of trypsin and LysC.

24. The method of claim 23, wherein the trypsin is methylated and/or acetylated.

25. The method of any one of claims 1-23, wherein the amount of the one or more proteolytic enzymes is in a proteolytic enzyme concentration to sample protein weight ratio of about 1:20 to about 1:40.

26. The method of any one of claims 1-25, wherein quenching the one or more proteolytic enzymes is performed using an acid.

27. The method of any one of claims 1-26, wherein the acid is formic acid (FA) or trifluoroacetic acid (TFA), or a mixture thereof.

28. The method of any one of claims 2-27, wherein the reduction technique is performed at a temperature of about 35° C. to about 70° C.

29. The method of any one of claims 2-28, wherein the reduction incubation time is at least about 20 minutes.

30. The method of any one of claims 2-29, wherein the reduction technique is performed at a temperature of about 60° C. for at least about 50 minutes.

31. The method of any one of claims 2-30, wherein the reduction technique is performed using a third thermal cycle,
wherein the lid temperature during the third thermal cycle is at least about 2° C. higher than the temperature of the block temperature during the third thermal cycle.

32. The method of claim 31, wherein the third thermal cycle is performed in a thermal cycler comprising a lid temperature control element.

33. The method of any one of claims 1-22, wherein the reducing agent is dithiothreitol (DTT) or tris(2-carboxyethyl) phosphine (TCEP).

34. The method of claim 33, wherein DTT is added in an amount of about 10 mM to about 100 mM.

35. The method of any one of claims 2-34, wherein the alkylation technique is performed at a temperature of about 20° C. to about 37° C.

36. The method of any one of claims 2-35, wherein the alkylation incubation time is at least about 5 minutes.

37. The method of any one of claims 2-36, wherein the alkylation technique is performed at a temperature of about 20° C. to about 25° C. for at least about 30 minutes.

38. The method of any one of claims 2-37, wherein the alkylating agent is iodoacetamide (IAA).

39. The method of claim 38, wherein IAA is added in an amount of about 10 mM to about 200 mM.

40. The method of any one of claims 4-39, wherein quenching the alkylating agent comprises use of a neutralizing agent.

41. The method of claim 40, wherein the neutralizing agent is DTT.

42. The method of any one of claims 1-4 and 6-41, wherein the proteolytically digested sample is introduced to the LC-MS system without performing an offline desalting technique.

43. The method of any one of claims 1-4 and 6-42, wherein the period of diversion of the LC-MS technique comprises about 1 to about 5 column volumes of the initial eluate that are diverted to waste.

44. The method of any one of claims 1-4, and 6-43, wherein the LC-MS technique is a high pressure LC-MS technique.

45. The method of any one of claims 1-4 and 6-43, wherein the LC-MS technique comprises multiple reaction monitoring.

46. The method of any one of claims 1-4 and 6-45, further comprising adding a standard to the proteolytically digested sample prior to the LC-MS technique.

47. The method of claim 46, wherein the standard is a stable isotope-internal standard (SI-IS) peptide mixture.

48. The method of any one of claims 1-47, wherein the biological sample is admixed with a buffer prior to the thermal denaturation technique.

49. The method of claim 48, wherein the buffer is ammonium bicarbonate.

50. The method of any one of claims 1-49, wherein the proteolytic glycopeptide comprises one or more sialic acid groups.

51. The method of any one of claims 33-50, wherein the proteolytically digested sample introduced to the liquid chromatography (LC) system comprises one or more of the DTT, the IAA, the iodide, and a disulfide bonded 6-membered ring, wherein the disulfide bonded 6-membered ring is a byproduct of DTT.

52. A method for processing a proteolytically digested sample to produce a processed sample suitable for use in a liquid chromatography-mass spectrometry (LC-MS) analysis, wherein the proteolytically digested sample comprises a plurality of proteolytic polypeptides comprising at least one proteolytic glycopeptide,
the method comprising:
performing one or more of the following:
(a) subjecting the proteolytically digested sample to a solid phase extraction column comprising a reversed-phase medium according to one or more conditions to associate at least a portion of the plurality of proteolytic polypeptides with the reversed-phase medium, the one or more conditions comprising:
(i) a polypeptide loading amount of about 50% or less of a binding capacity of the reversed-phase medium,
wherein the binding capacity of the reversed-phase medium is based on an insulin load having 10% or less breakthrough; or
(ii) a polypeptide loading concentration of about 0.6 μg/μL or less; or
(b) subjecting the reversed-phase medium comprising the associated proteolytic polypeptides to a wash buffer at a wash flow rate of about 0.1 column volumes/minute to about 2 column volumes/minute; and
subjecting the reversed-phase medium comprising the associated proteolytic polypeptides to an elution buffer to produce the processed sample.

53. The method of claim 52, wherein the one or more conditions comprises the polypeptide loading amount of about 50% or less of the binding capacity of the reversed-phase medium.

54. The method of claim 52 or 53, wherein the one or more conditions comprises the polypeptide loading concentration of about 0.6 μg/μL or less.

55. The method of any one of claim 52-54, wherein the performing comprises the subjecting the reversed-phase medium comprising the associated proteolytic polypeptides to the wash flow rate of about 0.1 column volumes/minute to about 2 column volumes/minute.

56. The method of any one of claims 52-55, wherein the column comprising the reversed-phase material has a medium volume of about 1 to about 10 μL.

57. The method of any one of claims 52-56, wherein the polypeptide loading amount is about 30 μg to about 200 μg.

58. The method of any one of claims 52-57, wherein the polypeptide loading amount is contained in a solution volume of at least about 100 μL.

59. The method of any one of claims 52-58, wherein the wash flow rate ranges from about 0.5 L/minutes to about 10 μL/minute.

60. The method of any one of claims 52-59, wherein the reversed-phase medium comprises an alkyl-based moiety covalently bound to a solid phase.

61. The method of claim 60, wherein the alkyl-based moiety comprises an octadecyl carbon functional group (C18) covalently bound to the solid phase.

62. The method of claim 60, wherein the alkyl-based moiety comprises an octa carbon functional group (C8) covalently bound to the solid phase.

63. The method of claim 60, wherein the carbon alkyl-based moiety comprises a tetra carbon functional group (C4) covalently bound to the solid phase.

64. The method of any one of claims 60-63, wherein the solid phase comprises a silica material.

65. The method of any one of claims 52-59, wherein the reversed-phase medium comprises a hydrophobic polymer material.

66. The method of claim 65, wherein the hydrophobic polymer material comprises a phenyl moiety.

67. The method of claim 66, wherein the hydrophobic polymer material comprises a reaction product of divinylbenzene.

68. The method of claim 67, wherein the hydrophobic polymer material comprises poly(styrene-co-divinylbenzene).

69. The method of any one of claims 52-68, further comprising subjecting the reversed-phase medium comprising the associated proteolytic polypeptides to a wash buffer prior to subjecting the reversed-phase medium to the elution buffer.

70. The method of any one of claims 52-69, further comprising subjecting the processed sample comprising the elution buffer to a drying technique to produce a dried sample.

71. The method of any one of claims 52-70, further comprising reconstituting the dried sample to produce a reconstituted sample and inputting the reconstituted sample into a LC chromatography system of a LC-MS system to obtain mass spectrometry data.

72. The method of claim 71, further comprising identifying a polypeptide sequence of a glycopeptide from the mass spectrometry data.

73. The method of claim 72, further comprising identifying a glycan attachment site of the glycopeptide from the mass spectrometry data.

74. The method of claim 72 or 73, further comprising identifying a glycan structure of the glycopeptide from the mass spectrometry data.

75. The method of any one of claims 73-74, wherein the at least one glycopeptide comprises a glycan structure comprising one or more sialic acid moieties.

76. The method of any one of claims 52-75, wherein the proteolytically digested sample is obtained from a method for proteolytically digesting a biological sample comprising a glycoprotein.

77. A method for performing a liquid chromatography-mass spectrometry (LC-MS) analysis of a proteolytic glycopeptide derived from a blood sample deposited on a delimited zone of an absorbent or bibulous member
wherein the blood sample comprises a plurality of polypeptides comprising at least one glycoprotein,
the method comprising:
extracting at least a portion of the plurality of polypeptides and one or more extraction internal standards from the absorbent or bibulous member to obtain an extracted sample,
wherein the absorbent or bibulous member comprises the one or more extraction internal standards prior to deposition of the blood sample within the delimited zone, and
wherein at least one of the one or more extraction internal standards comprises a polypeptide standard;
subjecting the extracted sample or a derivative thereof to a proteolytic digestion technique to produce a proteolytically digested sample comprising the proteolytic glycopeptide;
introducing at least a portion of the proteolytically digested sample to a liquid chromatography (LC) system of a LC-MS system; and
performing the LC-MS analysis on at least the proteolytic glycopeptide and the one or more extraction internal standards.

78. The method of claim 77, wherein the performing the LC-MS analysis comprises measuring an abundance signal for the proteolytic glycopeptide and an abundance signal for the one or more extraction internal standards.

79. The method of claim 78, wherein the performing the LC-MS analysis further comprises calculating a concentration of the proteolytic glycopeptide based on a concentration of the one or more extraction internal standards prior to deposition on the absorbent or bibulous member, the abundance signal for the proteolytic glycopeptide, and the abundance signal for the one or more extraction internal standards.

80. The method of claim 77, wherein the absorbent or bibulous member is a dried blood spot card.

81. The method of any one of claims 77-80, further comprising determining an extraction efficiency based on the LC-MS analysis of at least one of the one or more extraction internal standards.

82. The method of any one of claims 77-81, further comprising determining a digestion efficiency based on the LC-MS analysis of at least one of the one or more extraction internal standards.

83. The method of any one of claims 77-82, further comprising assessing a sample migration pattern based on the LC-MS analysis of at least one of the one or more extraction internal standards.

84. The method of any one of claims 77-83, wherein the one or more extraction internal standards comprise a plurality of polypeptide standards, and wherein at least two of the plurality of polypeptide standards have different amino acid lengths.

85. The method of claim 84, wherein the amino acid lengths of the plurality of polypeptide standards of the one or more extraction internal standards range from 4 amino acid to 1500 amino acids.

86. The method of any one of claims 77-85, wherein the at least one polypeptide standard of the one or more extraction internal standards comprises at least one internal enzymatic cleavage site.

87. The method of any one of claims 77-86, wherein the one or more extraction internal standards comprise a plurality of polypeptide standards, wherein at least two of the plurality of polypeptide standards have different net hydrophobicities as based on a computation tool or partition coefficient analysis.

88. The method of claim 87, wherein the plurality of polypeptide standards having different net hydrophobicities comprises a hydrophobicity range of about −0.5 to about 1 according to the Grand average of hydropathicity index (GRAVY).

89. The method of any one of claims 77-88, wherein the at least one polypeptide standard of the one or more extraction internal standards comprises a C-terminal arginine or lysine.

90. The method of any one of claims 77-89, wherein the at least one polypeptide standard of the one or more extraction internal standards comprises an amino acid sequence that does not have homology to a peptide derived from the human proteome.

91. The method of any one of claims 77-90, wherein the at least one polypeptide standard of the one or more extraction internal standards is a synthetic polypeptide.

92. The method of any one of claims 77-91, wherein the at least one polypeptide standard of the one or more extraction internal standards comprises a stable heavy isotope label.

93. The method of any one of claims 77-92, wherein the at least one polypeptide standard of the one or more extraction internal standards comprises a sequence that is non-homologous to an endogenous polypeptide of an individual from which the blood sample originates.

94. The method of any one of claims 77-93, wherein the at least one polypeptide standard of the one or more extraction internal standards is an analog of an endogenous polypeptide of an individual from which the blood sample originates.

95. The method of claim 94, wherein the analog is a stable heavy isotope labeled analog.

96. The method of any one of claims 77-95, wherein the at least one polypeptide standard of the one or more extraction internal standards is a recombinantly expressed polypeptide.

97. The method of any one of claims 77-96, wherein the at least one polypeptide standard of the one or more extraction internal standards is a glycopolypeptide.

98. The method of any one of claims 77-97, wherein the at least one polypeptide standard of the one or more extraction internal standards is a polypeptide that does not substantially interact with hemoglobin.

99. The method of any one of claims 77-98, wherein the at least one polypeptide standard of the one or more extraction internal standards comprises at least a contiguous 4 amino acid sequence from SEQ ID NOS: 14-20.

100. The method of any one of claims 77-99, wherein the at least one polypeptide standard of the one or more extraction internal standards comprises a sequence is selected from the group consisting of SEQ ID NOS: 21-22.

101. The method of any one of claims 77-100, wherein the absorbent or bibulous member comprises a known amount of each of the one or more extraction internal standards.

102. The method of claim 102, wherein the known amount of each of the one or more extraction internal standards is about 0.05 ppm to about 5 ppm.

103. The method of any one of claims 77-103, wherein the one or more extraction internal standards are deposited and dried on the absorbent or bibulous member within an area having a surface area of about 1,000 mm² or less.

104. The method of claim 103, wherein the one or more extraction internal standard are deposited and dried on the absorbent or bibulous member within the delimited zone.

105. The method of any one of claims 77-104, wherein the extracting the at least the portion of the plurality of polypeptides and the one or more extraction internal standards from the absorbent or bibulous member comprises:
separating one or more portions of the absorbent or bibulous member from the absorbent or bibulous member,
wherein the one or more portions of the absorbent or bibulous member comprise at least a portion of the blood sample and the one or more extraction internal standards;
extracting at least the portion of the plurality of polypeptides and the one or more extraction internal standards from the one or more portions of the absorbent or bibulous member into an extraction solution; and
precipitating at least the portion of the plurality of polypeptides and the one or more extraction internal standards to obtain the extracted sample.

106. The method of claim 105, wherein the separating the one or more portions of the absorbent or bibulous member comprises punching the one or more portion of the absorbent or bibulous member using a punching device.

107. The method of claim 105 or 106, wherein each of the one or more portions separated from the absorbent or bibulous member have a surface area of about 2 mm² to about 100 mm².

108. The method of any one of claims 105-107, wherein the precipitating at least the portion of the plurality of polypeptides and the one or more extraction internal standards comprises subjecting the at least the portion of the plurality of polypeptides and the one or more extraction internal standards to ethanol.

109. The method of any one of claims 77-108, further comprising adding a solution to the extracted sample to resolubilize polypeptide content therein prior to subjecting the extracted sample or the derivative thereof to the proteolytic digestion technique.

110. The method of any one of claims 77-109, wherein the proteolytic digestion technique comprises a thermal denaturation technique.

111. The method of claim 110, wherein the proteolytic digestion technique further comprises a reduction technique and an alkylation technique.

112. The method of claim 110 or 111, wherein the proteolytic digestion technique comprises the use of one or more proteases.

113. The method of claim 112, wherein the protease is trypsin.

114. The method of any one of claims 77-108, further comprising adding one or more quantification internal standards after subjecting the extracted sample or the derivative thereof to a proteolytic digestion technique and prior to introducing at least the portion of the proteolytically digested sample to the liquid chromatography LC system of the LC-MS system.

115. The method of any one of claims 77-114, wherein the LC-MS analysis comprises a multiple-reaction-monitoring (MRM) technique targeting the proteolytic glycopeptide and the one or more extraction internal standards.

116. The method of claim 114 or 115, wherein the LC-MS analysis comprises a multiple-reaction-monitoring (MRM) technique targeting the one or more quantification internal standards.

117. The method of any one of claims 77-116, wherein the absorbent or bibulous member comprises a delimited zone having a surface area of about 1,000 mm² or less.

118. The method of any one of claims 77-117, wherein the absorbent or bibulous member comprises a filter paper material.

119. The method of claim 118, wherein the filter paper material comprises a cellulose-based paper.

120. The method of claim 118 or 119, wherein the filter paper material prevents or reduces sample hemolysis.

121. The method of any one of claims 77-120, wherein the absorbent or bibulous member comprises a lateral flow material configured to separate whole blood into a portion of plasma, wherein the whole blood is deposited at the delimited zone and then a liquid portion of the whole blood laterally flows from the delimited zone to a distal zone, wherein the distal zone contains the portion of the plasma.

122. An absorbent or bibulous member comprising one or more extraction internal standard deposited thereon on a delimited zone, wherein the one or more extraction internal standards comprises at least one polypeptide standard, and wherein the absorbent or bibulous member does not comprise a blood sample deposited thereon.

123. The absorbent or bibulous member of claim 122, wherein the absorbent or bibulous member is a blood spot card.

124. A method of classifying a biological sample obtained from a subject with respect to a plurality of states associated with a pelvic cancer, the method comprising receiving peptide structure data corresponding to a set of glycoproteins in the biological sample;
inputting quantification data identified from the peptide structure data for a set of peptide structures into a machine-learning model trained to identify a disease indicator based on the quantification data, wherein the set of peptide structures comprises at least one peptide structure identified from a plurality of peptide structures in Table 9;
identifying, by the machine-learning model, the disease indicator; and
classifying the biological sample with respect to a plurality of states associated with pelvic cancer based upon the identified disease indicator.

125. A method of detecting the presence of one of a plurality of states associated with a pelvic cancer in a subject, the method comprising
receiving peptide structure data corresponding to a set of glycoproteins in a biological sample obtained from a subject, wherein the peptide structure data comprises at least one peptide structure from Table 9;
inputting quantification data identified from the peptide structure data for a set of peptide structures into a machine-learning model trained to identify a disease indicator based on the quantification data; and
detecting the presence of a corresponding state of the plurality of states associated with the pelvic cancer in response to a determination that the identified disease indicator falls within a selected range associated with the corresponding state.

126. The method of claim 124 or 125, wherein the plurality of states comprises at least one of a malignant tumor or a benign tumor.

127. The method of anyone of claims 124-126, wherein the machine-learning model comprises a logistic regression model.

128. The method of any one of claims 124-127, further comprising administering to the subject an effective amount of an agent to treat the pelvic tumor.

129. The method of any one of claims 124-128, wherein the pelvic tumor is ovarian cancer.

130. A method of treating a pelvic tumor in a subject comprising
receiving peptide structure data corresponding to a set of glycoproteins in a biological sample obtained from a subject, wherein the peptide structure data comprises at least one peptide structure from Table 9;
inputting quantification data for the at least one peptide structure into a machine-learning model trained to generate a risk score based on the quantification data;
outputting, by the machine-learning model, the quantification data using the machine learning model to generate a risk score,
administering an effective amount of an agent to treat the pelvic cancer based upon the risk score.

131. A method of determining a diagnosis for a pelvic tumor in a subject comprising receiving peptide structure data corresponding to a set of glycoproteins in a biological sample;
inputting quantification data identified from the peptide structure data for a set of peptide structures into a machine-learning model trained to identify a disease indicator based on the quantification data, wherein the set of peptide structure data comprises at least one peptide structure identified from a plurality of peptide structures in Table 9;
identifying, by the machine-learning model, the disease indicator; and
determining a diagnosis for the pelvic tumor based upon the identified disease indicator.

132. The method of claim 131, wherein the diagnosis is the presence of a malignant tumor or a benign tumor.

133. A method of treating a pelvic tumor in a subject comprising
receiving peptide structure data corresponding to a set of glycoproteins in a biological sample;
inputting quantification data identified from the peptide structure data for a set of peptide structures into a machine-learning model trained to identify a disease indicator based on the quantification data, wherein the peptide structure data comprises at least one peptide structure identified from a plurality of peptide structures in Table 9;
identifying, by the machine-learning model, the disease indicator;
determining a risk score the identified disease indicator; and
administering an effective amount of an agent to treat the pelvic tumor based upon the risk score.

134. A method of treating a pelvic tumor in an individual comprising detecting the presence or amount of at least one peptide structure, wherein the at least one peptide structure comprises at least one peptide structure from Table 9, and administering an effective amount of an agent to treat the pelvic tumor based upon the presence or amount of the peptide structure.

135. A method of diagnosing an individual with a benign or malignant pelvic tumor comprising detecting a presence or amount of at least one peptide structure, wherein the at least one peptide structure comprises at least one peptide structure from Table 9, and diagnosing the individual with a benign or malignant pelvic tumor based upon the presence or amount of the at least one peptide structure.

136. A method of diagnosing an individual with a pelvic tumor comprising
detecting the presence or amount of at least one peptide structure from Table 9;
inputting a quantification of the detected at least one peptide structure into a machine-learning model trained to generate a class label,
determining if the class label is above or below a threshold for a classification;
identifying a diagnostic classification for the individual based on whether the class label is above or below a threshold for the classification; and
diagnosing the individual as having a benign or malignant pelvic tumor on the diagnostic classification.

137. The method of any one of claims 124-133, further comprising detecting the presence or amount of at least one peptide structure from Table 9.

138. The method of any one of claims 134-137, wherein the presence or amount of the at least one peptide structure is detected using mass spectrometry or ELISA.

139. The method of claim 138, wherein the presence or amount of the at least one peptide structure is detected using MRM mass spectrometry.

140. The method of any one of claims 134-139, wherein the amount of at least one peptide structure is none, or below a detection limit.

141. The method of any one of claims 124-140, wherein the at least one peptide structure comprises two or more peptide structures identified in Table 9, three or more peptides structures identified in Table 9, four or more peptide structure identified in Table 9, five or more peptide structures identified in Table 9, six or more peptide structures identified in Table 9, seven or more peptide structures identified in Table 9, or eight or more peptide structure identified in Table 9.

142. The method of any one of claims 124-141 wherein the at least one peptide structure comprises the sequence set forth in SEQ ID NOs: 35-51.

143. The method of any one of claims 124-142, wherein the at least one peptide structure comprises the sequence set forth in SEQ ID NOs: 35-42.

144. The method of any one of claims 124-142, wherein the at least one peptide structure comprises the sequence set forth in SEQ ID NOs: 43-51.

145. The method of any one of claims 124-142, wherein the at least one peptide structure comprises the sequence set forth in SEQ ID NOs: 35-40.

146. The method of any one of claims 124-145, wherein the biological sample is a blood sample, a serum sample, or tumor tissue.

147. The method of claim 146, wherein the biological sample is the blood sample, wherein the blood sample is deposited on a delimited zone of an absorbent or bibulous member comprising a plurality of polypeptides comprising at least one glycoprotein.

148. The method of claim 147 further comprising
extracting at least a portion of the plurality of polypeptides and one or more extraction internal standards from the absorbent or bibulous member to obtain an extracted sample,
wherein the absorbent or bibulous member comprises the one or more extraction internal standards prior to deposition of the blood sample within the delimited zone, and
wherein at least one of the one or more extraction internal standards comprises a polypeptide standard;
subjecting the extracted sample or a derivative thereof to a proteolytic digestion technique to produce a proteolytically digested sample comprising the proteolytic glycopeptide;
introducing at least a portion of the proteolytically digested sample to a liquid chromatography (LC) system of a LC-MS system; and
performing the LC-MS analysis on at least the proteolytic glycopeptide and the one or more extraction internal standards, wherein the at least one proteolytic glycopeptide comprises at least one peptide structure set forth in Table 9.

149. A method for performing a liquid chromatography-mass spectrometry (LC-MS) analysis of a proteolytic glycopeptide derived from a blood sample from an individual deposited on a delimited zone of a blood spot card, the method comprising
obtaining a blood spot card comprising a blood sample from the individual deposited thereon, wherein the blood spot card comprises one or more extraction internal standards deposited and dried prior to deposition of the blood sample on the blood spot card, and
wherein the blood spot card comprising the blood sample contains at least a portion of the blood sample and the one or more extraction internal standards in an overlapping area of the blood spot card;
extracting at least a portion of the plurality of polypeptides and the one or more extraction internal standards from the blood spot card to obtain an extracted sample;
subjecting the extracted sample or a derivative thereof to a proteolytic digestion technique to produce a proteolytically digested sample comprising the proteolytic glycopeptide;
introducing at least a portion of the proteolytically digested sample to a liquid chromatography (LC) system of a LC-MS system; and
performing an LC-MS analysis to quantify one or more biomarkers of ovarian cancer and the one or more extraction internal standards,
wherein the one or more biomarkers comprise a polypeptide comprising a sequence of any of SEQ ID NOs: 35-51, and
wherein at least one of the one or more biomarkers is a glycopeptide.

150. The method of claim 148 or 149, wherein the at least one polypeptide standard of the one or more extraction internal standards comprises at least a contiguous 4 amino acid sequence from SEQ ID NOs: 14-20.

151. The method of any one of claims 148-150, wherein the at least one polypeptide standard of the one or more extraction internal standards comprises a sequence is selected from the group consisting of SEQ ID NOs: 21-22.

152. The method of any one of claims 148-151, wherein the absorbent or bibulous member comprises a known amount of each of the one or more extraction internal standards.

153. The method of any one of claims 148-152, wherein extracting the at least the portion of the plurality of polypeptides and the one or more extraction internal standards from the absorbent or bibulous member comprises:
separating one or more portions of the absorbent or bibulous member from the absorbent or bibulous member,
wherein the one or more portions of the absorbent or bibulous member comprise at least a portion of the blood sample and the one or more extraction internal standards;
extracting at least the portion of the plurality of polypeptides and the one or more extraction internal standards from the one or more portions of the absorbent or bibulous member into an extraction solution; and
precipitating at least the portion of the plurality of polypeptides and the one or more extraction internal standards to obtain the extracted sample.

154. The method of claim 153, wherein the precipitating at least the portion of the plurality of polypeptides and the one or more extraction internal standards comprises subjecting at least the portion of the plurality of polypeptides and the one or more extraction internal standards to ethanol.

155. The method of any one of claims 148-154, further comprising adding a solution to the extracted sample to resolubilize polypeptide content therein prior to subjecting the extracted sample or the derivative thereof to the proteolytic digestion technique.

156. The method of any one of claims 148-155, wherein the proteolytic digestion technique comprises a thermal denaturation technique.

157. The method of claim 156, wherein the proteolytic digestion technique further comprises a reduction technique and an alkylation technique.

158. The method of claim 156 or 157, wherein the proteolytic digestion technique comprises the use of one or more proteases.

159. The method of claim 158, wherein the protease is trypsin.

160. The method of any one of claims 124-159, wherein the absorbent or bibulous member comprises a filter paper material.

161. The method of claim 160, wherein the filter paper material comprises a cellulose-based paper.

162. The method of claim 160 or 161, wherein the filter paper material prevents or reduces sample hemolysis.

163. The method of any one of claims 124-162, wherein the absorbent or bibulous member comprises a lateral flow material configured to separate whole blood into a portion of plasma, wherein the whole blood is deposited at the delimited zone and then a liquid portion of the whole blood laterally flows from the delimited zone to a distal zone, wherein the distal zone contains the portion of the plasma.

164. A method of training a model to diagnose a subject with one of a plurality of states associated with a pelvic tumor, the method comprising
receiving quantification data for a panel of peptide structures for a plurality of subjects
diagnosed with the plurality of states associated with a pelvic tumor
wherein the panel of peptide structures comprises at least one peptide structure set forth in Table 9; and
training a machine-learning model to determine a state of the plurality of states a biological sample from the subject based on the quantification data.

165. The method of claims 124-133 and 164, wherein the quantification data comprises at least one of an abundance, a relative abundance, a normalized abundance, a relative quantity, an adjusted quantity, a normalized quantity, a relative concentration, an adjusted concentration, or a normalized concentration.

166. The method of claim 164 or claim 165, wherein the machine-learning model is trained using random forest or logical progression training methods.

167. The method of any one of claims 164-166, wherein training the machine-learning model to determine the state of the plurality of states comprises training the machine-learning model to generate a class label for the state of the plurality of states.

168. The method of any one of claims 164-167 wherein the machine-learning model comprises a logistic regression model.

169. The method of any one of claims 124-149 and 164-168, wherein at least one of the peptide structures comprises a glycopeptide.

170. A composition comprising one or more peptide structures from Table 9.

171. A composition comprising one or more peptides comprising the sequence set forth in SEQ ID NOs: 35-51.

172. A method for processing a proteolytic digest sample for use in a liquid chromatography-mass spectrometry (LC-MS) analysis,
wherein the proteolytic digest sample comprises a plurality of proteolytically digested peptides comprising at least one proteolytically digested glycopeptide,
the method comprising:
(A) loading a hydrophilic interaction liquid chromatography (HILIC) load derived from the proteolytic digest sample to a solid phase extraction column comprising a HILIC medium according to one or more conditions to associate the at least one proteolytically digested glycopeptide with the HILIC medium, the one or more conditions comprising:
(1) the loading of the HILIC load to the solid phase extraction column is initiated when the HILIC medium is in a dry state;
(2) the HILIC load loaded to the solid phase extraction column has an amount of the plurality of proteolytically digested peptides characterized by one or both of:
(a) a ratio of a weight of the plurality of proteolytically digested peptides over a weight of the HILIC medium in the dry state of at least about 0.06; and/or
(b) a ratio of the weight of the plurality of proteolytically digested peptides relative to a bed volume of the HILIC medium in the dry state of at least about 40 μg/μl; or
(3) the HILIC load loaded to the solid phase extraction column has a concentration of an organic solvent of at least about 70% (v/v); and
(B) subjecting the HILIC medium to an elution liquid to obtain a HILIC eluate comprising the at least one proteolytically digested glycopeptide.

173. The method of claim 172, wherein the one or more loading conditions comprise the loading of the HILIC load to the solid phase extraction column being initiated when the HILIC medium is in the dry state.

174. The method of claim 172 or 173, wherein the HILIC load is characterized by having the ratio of the weight of the plurality of proteolytically digested peptides over the weight of the HILIC medium in the dry state of at least about 0.06.

175. The method of any one of claims 172-174, wherein the HILIC load is characterized by having the ratio of the weight of the plurality of proteolytically digested peptides relative to the bed volume of the HILIC medium in the dry state of at least about 40 μg/μl.

176. The method of any one of claims 172-175, wherein the weight of the HILIC medium in the dry state is about 3 mg or the bed volume of the HILIC medium in the dry state is about 5 UL.

177. The method of claim 176, wherein the HILIC load is characterized by having the ratio of the weight of the plurality of proteolytically digested peptides over the weight of the HILIC medium in the dry state of about 0.1.

178. The method of claim 176 or 177, wherein the HILIC load is characterized by having the ratio of the weight of the plurality of proteolytically digested peptides relative to the bed volume of the HILIC medium in the dry state of about 60 μg/μl.

179. The method of claim 176, wherein the HILIC load is characterized by having the ratio of the weight of the plurality of proteolytically digested peptides over the weight of the HILIC medium in the dry state of about 0.2.

180. The method of claim 176 or 179, wherein the HILIC load is characterized by having the ratio of the weight of the plurality of proteolytically digested peptides relative to the bed volume of the HILIC medium in the dry state of about 120 μg/μl.

181. The method of any one of claims 172-180, wherein the one or more conditions comprise the HILIC load loaded to the solid phase extraction column having the concentration of the organic solvent of at least about 70% (v/v).

182. The method of any one of claims 172-181, wherein the HILIC medium comprises less than about 5% (v/v) of a liquid at the initiation of the loading of the HILIC load to the solid phase extraction column.

183. The method of claim 182, wherein, at the initiation of the loading of the HILIC load to the HILIC medium of the solid phase extraction column, the HILIC medium is not equilibrated with an equilibration liquid.

184. The method of any one of claims 172-183, wherein the HILIC load comprises an amount of the plurality of proteolytically digested peptides of at least about 200 μg.

185. The method of any one of claims 172-184, wherein the concentration of the organic solvent in the HILIC load is at least about 80% (v/v).

186. The method of any one of claims 172-185, wherein the organic solvent comprises an aprotic solvent miscible in water.

187. The method of any one of claims 172-186, wherein the organic solvent is selected from the group consisting of acetonitrile, ethanol, methanol, tetrahydrofuran, and dioxane, or a combination thereof.

188. The method of any one of claims 172-187, further comprising obtaining the HILIC load.

189. The method of claim 188, wherein obtaining the HILIC load comprises reducing a liquid content from the proteolytic digest sample without substantial loss of the plurality of proteolytically digested peptides in the proteolytic digest sample.

190. The method of claim 189, wherein the reducing the liquid content from the proteolytic digested sample comprises performing a peptide concentrating technique with the proteolytically digested sample to obtain a precursor of the HILIC load such that (a) the precursor can be reconstituted with a reconstitution liquid comprising the organic solvent to obtain the HILIC load having a volume of 220 μL or less and a concentration of the organic solvent of at least about 70% (v/v); and (b) the resulting HILIC load comprises an amount of the plurality of proteolytically digested peptides of at least about 200 μg.

191. The method of claim 188, further comprising:
reducing a liquid content from the proteolytic digest sample to form a dried proteolytic digest sample; and
reconstituting the dried proteolytic digest sample with a reconstitution liquid comprising the organic solvent to produce the HILIC load such that (a) the HILIC load has a volume of 220 μL or less and a concentration of the organic solvent of at least about 70% (v/v); and (b) the HILIC load has an amount of the plurality of proteolytic peptides of at least about 200 μg.

192. The method of claim 191, wherein the reconstituting the dried proteolytic digest sample comprises:
mixing the dried proteolytic digest sample with an amount of water to form a water mixture:
sonicating the water mixture with a sonicator;
mixing the water mixture with an amount of trifluoracetic acid (TFA) and acetonitrile (ACN), wherein the amount of TFA and ACN are such that the final concentration of TFA is 1% (v/v) and the final concentration of ACN is 80% (v/v); and
sonicating the water mixture having the amount of TFA and ACN with a sonicator to produce the HILIC load.

193. The method of claim 192, wherein the sonicating the water mixture with the sonicator comprises a water-based dissolution cycle,
wherein the water-based dissolution cycle is repeated about 2 times to about 5 times, and wherein for each of the water-based dissolution cycles, the sonicating the water mixture is performed for about 5 minutes and a water reservoir of the sonicator is configured with ice to cool the water reservoir.

194. The method of claim 192 or 193, wherein the sonicating the water mixture having the amount of TFA and ACN with the sonicator comprises an organic-based dissolution cycle,
wherein the organic-based dissolution cycle is repeated about 2 times to about 3 times, and wherein for each of the organic-based dissolution cycles, the sonicating is performed for about 4 minutes and a water reservoir of the sonicator is configured with ice to cool the water reservoir.

195. The method of any one of claims 189-194, wherein the reducing the liquid content from the proteolytic digest sample comprises removing all or substantially all of the liquid content therefrom.

196. The method of any one of claims 189-194, wherein the peptide concentrating technique comprises a vacuum evaporation technique or a lyophilization technique.

197. The method of any one of claims 172-196, wherein the volume of the HILIC load is 220 μL or less.

198. The method of any one of claims 172-197, wherein the HILIC medium comprises a solid phase or a solid phase comprising a polar functional moiety.

199. The method of claim 150, wherein the solid phase comprises a silica material.

200. The method of claim 198 or 199, wherein the polar functional moiety comprises one or more of an amino group, a cyano group, a carbamoyl group, an aminoalkyl group, alkylamide group, or a combination thereof.

201. The method of any one of claims 172-200, further comprising performing a washing step after loading the HILIC load to the solid phase extraction column and prior to the subjecting the HILIC medium to the elution liquid, wherein the washing step comprises subjecting the HILIC medium to a wash liquid.

202. The method of any one of claims 172-201, further comprising collecting the HILIC eluate, or a fraction thereof, from the solid phase extraction column, wherein the HILIC eluate comprises the at least one proteolytically digested glycopeptide.

203. The method of claim 202, wherein after the collecting the HILIC eluate from the solid phase extraction column, the method further comprises reducing a liquid content of the collected HILIC eluate.

204. The method of any one of claims 172-203, further comprising subjecting the HILIC eluate to a peptide concentrating technique to produce a dried HILIC eluate.

205. The method of claim 204, further comprising reconstituting the dried HILIC eluate to form a sample suitable for introduction to the LC-MS system.

206. The method of claim 205, further comprising injecting the sample suitable for introduction to the LC-MS system into the LC-MS system.

207. The method of any one of claims 172-206, further comprising performing a mass spectrometry technique to obtain mass spectrometry data.

208. The method of claim 207, further comprising identifying a peptide sequence of a glycopeptide from the mass spectrometry data.

209. The method of claim 208, further comprising identifying a glycan attachment site of the glycopeptide from the mass spectrometry data.

210. The method of claim 208 or 209, further comprising identifying a glycan structure of the glycopeptide from the mass spectrometry data.

211. The method of any one of claims 172-210, wherein the at least one glycopeptide comprises a glycan structure comprising one or more sialic acid moieties.

212. The method of any one of claims 172-211, wherein the proteolytic digest sample is obtained from a method for proteolytically digesting a biological sample comprising a glycoprotein.

213. The method of any one of claims 172-212, wherein a glycopeptide concentration for a glycopeptide derived from the proteolytic digest sample is enriched by a factor of 30 or greater with respect to a peptide concentration, wherein the peptide concentration represents an amount of a peptide that is associated with the same protein as the glycopeptide.

214. The method of any one of claims 172-213, further comprising:
measuring a first plurality of peak area values for a first panel of glycopeptides;
measuring a second plurality of peak area values for a second panel of unglycosylated peptides wherein each of the unglycosylated peptides of the second panel corresponds to each of the glycopeptides of the first panel by being attached to a same protein molecule before a proteolytic digestion;
calculating a plurality of ratios by dividing each of the first plurality of peak area values with each of the second plurality of peak area values, respectively; and
determining a median ratio from the plurality of ratios, wherein the median ratio is greater than 30.

215. A method of processing a blood-derived sample obtained from an individual for a glycoproteomic mass spectrometry (MS) technique, the method comprising:
(a) admixing the blood-derived sample with one or more defibrination factors to promote formation of a fibrin clot, the one or more defibrination factors comprises one or more members selected from the group consisting of:
a clotting co-factor;
a clotting enzyme; and
a clotting activator and/or an exogenous surface aggregation agent;
(b) separating the formed fibrin clot from the admixed blood-derived sample to obtain a fibrinogen-depleted sample; and
(c) subjecting the fibrinogen-depleted sample to one or more MS preparation techniques to produce a test sample for the glycoproteomic mass spectrometry technique.

216. The method of claim 215, wherein the one or more defibrination factors comprises the clotting co-factor.

217. The method of claim 216, wherein the clotting co-factor comprises a divalent cation.

218. The method of claim 217, wherein the clotting co-factor comprises the divalent cation, and wherein the divalent cation is Ca²⁺, Mg²⁺, Zn²⁺, or Cu²⁺, or any combination thereof.

219. The method of claim 217 or 218, wherein the divalent cation is Ca²⁺.

220. The method of any one of claims 216-219, wherein the clotting co-factor is calcium chloride, calcium acetate, calcium carbonate, calcium citrate, or calcium gluconate, or any combination thereof.

221. The method of any one of claims 216-220, wherein, following admixing with the blood-derived sample, the clotting co-factor has a concentration of about 5 mM to about 25 mM.

222. The method of any one of claims 215-221, wherein the one or more defibrination factors comprises the clotting enzyme.

223. The method of claim 222, wherein the clotting enzyme is thrombin.

224. The method of claim 222 or 223, wherein, following admixing with the blood-derived sample, the clotting enzyme has a concentration of about 1 unit/mL to 10 units/mL.

225. The method of any one of claim 215-224, wherein the one or more defibrination factors comprises the clotting activator and/or the exogenous surface aggregation agent.

226. The method of claim 225, wherein the clotting activator and/or the exogenous surface aggregation agent is an exogenous surface aggregation agent.

227. The method of claim 226, wherein the exogenous surface aggregation agent comprises Kaolin.

228. The method of claim 225, wherein the clotting activator and/or the exogenous surface aggregation agent is a clotting activator and exogenous surface aggregation agent.

229. The method of claim 228, wherein the clotting activator and exogenous surface aggregation agent comprises a material having pores with an average size of about 2 nm to about 60 nm.

230. The method of claim 228 or 229, wherein the clotting activator and exogenous surface aggregation agent comprises a silica particle.

231. The method of claim 230, wherein the silica particle has a pore size ranging from about 2 to about 60 nm.

232. The method of any one of claims 225-231, wherein the clotting activator and/or the exogenous surface aggregation agent is admixed with the blood-derived sample at an amount of about 50 μg to about 500 μg per 40 μL of the blood-derived sample.

233. The method of any one of claims 215-232, wherein the one or more defibrination factors comprise the clotting co-factor and the clotting enzyme.

234. The method of any one of claims 215-232, wherein the one or more defibrination factors comprise the clotting co-factor and the clotting activator and/or the exogenous surface aggregation agent.

235. The method of any one of claims 215-232, wherein the one or more defibrination factors comprise the clotting enzyme and the clotting activator and/or the exogenous surface aggregation agent.

236. The method of any one of claims 215-232, wherein the one or more defibrination factors comprise the clotting co-factor, the clotting enzyme, and the clotting activator and/or the exogenous surface aggregation agent.

237. The method of any one of claims 215-236, wherein more than one defibrination factor is admixed with the blood-derived sample sequentially.

238. The method of any one of claims 215-236, wherein more than one defibrination factor is admixed with the blood-derived sample simultaneously.

239. The method of any one of claims 215-238, wherein at least one of the one or more defibrination factors is added to a vessel containing the blood-derived sample.

240. The method of any one of claims 215-239, wherein the blood-derived sample is added to a vessel containing at least one of the one or more defibrination factors.

241. The method of any one of claims 215-240, wherein the method further comprises an incubation period following the admixing of the blood-derived sample with one or more defibrination factors.

242. The method of claim 241, wherein the incubation period is about 1 minute to about 30 minutes.

243. The method of any one of claims 215-242, wherein the separating the formed fibrin clot to obtain the fibrinogen-depleted sample comprises subjecting the admixed blood-derived sample with the one or more defibrination factors to a centrifugation technique and/or a filtration technique.

244. The method of any one of claims 215-243, wherein the separating the formed fibrin clot to obtain the fibrinogen-depleted sample comprises subjecting the admixed blood-derived sample with the one or more defibrination factors to a supernatant collection technique.

245. The method of any one of claims 215-244, wherein the fibrinogen-depleted sample is depleted of at least about 80% of the fibrinogen as compared to the blood-derived sample.

246. The method of any one of claims 215-245, wherein the fibrinogen-depleted sample is depleted of at least about 99% of the fibrinogen as compared to the blood-derived sample.

247. The method of any one of claims 215-246, wherein the blood-derived sample is a plasma sample.

248. The method of claim 247, wherein the plasma sample has been treated with an anticoagulant.

249. The method of claim 247 or 248, wherein the plasma sample has been treated with any one or more of the following: a citrate, an ACD (anticoagulant citrate dextrose), Streck, EDTA (ethylenediaminetetraacetic acid), Heparin or Li-Heparin, oxalate fluoride, or a citrate phosphate dextrose adenine (CPDA).

250. The method of any one of claims 215-249, wherein the blood-derived sample is a serum sample.

251. The method of any one of claims 215-250, wherein the one or more MS preparation techniques comprises subjecting the fibrinogen-depleted sample, or a derivative thereof, to a thermal denaturation technique.

252. The method of any one of claims 215-251, wherein the one or more MS preparation techniques comprises subjecting the fibrinogen-depleted sample, or a derivative thereof, to a proteolytic digestion technique.

253. The method of claim 252, wherein the proteolytic digestion technique comprises the use of one or more proteases.

254. The method of claim 253, wherein proteolytic digestion technique comprises the use of trypsin.

255. The method of claim 253 or 254, wherein the one or more proteases are present at a weight ratio of about 1:30 or less, relative to polypeptide content of the fibrinogen-depleted sample, or a derivative thereof.

256. The method of any one of claims 215-255, wherein the one or more MS preparation techniques comprises subjecting the fibrinogen-depleted sample, or a derivative thereof, to a desalting technique.

257. The method of any one of claims 215-256, further comprising performing the glycoproteomic mass spectrometry technique.

258. The method of any one of claims 215-257, wherein the glycoproteomic mass spectrometry technique comprises a liquid chromatography-mass spectrometry (MS) (LC-MS) technique.

259. The method of claim 258, wherein the LC-MS technique comprises a period of diversion of an initial eluate comprising a salt.

260. The method of any one of claims 215-259, wherein the glycoproteomic mass spectrometry technique comprises a multiple-reaction-monitoring (MRM) technique targeting a glycopeptide.

261. A method of preparing a plasma sample obtained from an individual for a glycoproteomic mass spectrometry technique, the method comprising:
(a) admixing the plasma sample with defibrination factors to promote formation of a fibrin clot, the defibrination factors comprising:
a clotting co-factor;
a clotting enzyme; and
a clotting activator and/or an exogenous surface aggregation agent;
(b) separating the formed fibrin clot from the admixed plasma sample to obtain a fibrinogen-depleted sample; and
(c) subjecting the fibrinogen-depleted sample to one or more MS preparation techniques to produce a test sample for the glycoproteomic mass spectrometry technique.

262. The method of claim 261, wherein, after following admixing with the blood-derived sample:
the clotting co-factor comprises Ca²⁺ at a concentration of about 5 mM to about 25 mM;
the clotting enzyme comprises thrombin at a concentration of about 1 unit/mL to 10 units/mL; and
the clotting activator and/or the exogenous surface aggregation agent is in an amount of about 50 μg to about 500 μg per 40 μL of the blood-derived sample.

263. A defibrination composition comprising:
a clotting co-factor;
a clotting enzyme; and
a clotting activator and/or an exogenous surface aggregation agent.

264. A vessel comprising a defibrination composition of claim 263.

265. A method for analyzing a set of peptide structures comprising a linking site, the method comprising:
A) calculating a site occupancy score, for a given peptide structure at the linking site, as a function of an adjusted-raw abundance value for the given peptide structure and a sum of a set of adjusted-raw abundance values of the set of peptide structures; and
B) calculating a monomer weight score as a sum of the site occupancy score and a multiplier, wherein the multiplier is the number of a specific monomer in the set of peptide structures at the linking site.

266. The method of claim 265, further comprising, prior to (A), receiving a set of raw abundance values of the set of peptide structures and normalizing the set of raw abundance values to a corresponding reference run to generate the set of adjusted-raw abundance values.

267. The method of claim 266, further comprising, prior to (B), calculating a peptide structure monomer weight score as a function of the site occupancy score and the number of a specific monomer for the given peptide structure.

268. The method of claim 267, wherein the monomer weight score is a function of the peptide structure monomer weight score and the site occupancy score.

269. The method of any one of claims 265-268, wherein the set of peptide structures is from a biological sample from a subject.

270. The method of claim 269, wherein the biological sample comprises serum or plasma samples.

271. The method of claim 270, wherein the reference run comprises serum or plasma samples.

272. The method of any one of claims 265-271, further comprising:
correlating the monomer weight score with an indication or disease state to determine a hazard ratio for the indication or disease state, wherein the hazard ratio is used to update a risk profile of the subject for the indication or disease state.

273. The method of any one of claims 265-272, further comprising:
generating a diagnosis output for the indication or disease state for the subject, using a predictive model, as a function of the monomer weight score, wherein the diagnosis output is one of a predictive probability or a risk score.

274. The method of claim 273, wherein the predictive model is a logistic regression model, wherein the predictive model generates at least one marker that is correlated with the indication or disease state.

275. The method of any one of claims 265-274, further comprising:
calculating a site occupancy score, for a given peptide structure at the linking site, as the quotient of the adjusted-raw abundance value for the given peptide structure over the sum of the set of adjusted-raw abundance values.

276. The method of any one of claims 265-275, further comprising:
calculating a peptide structure monomer weight score as a product of the site occupancy score and the number of specific monomers for the given peptide structure.

277. The method of claim 276, further comprising:
calculating a monomer weight score for the subject as a sum of peptide structure monomer weight scores for each peptide structure at the linking site.

278. The method of any one of claims 265-277, further comprising:
generating a diagnosis output, based on the monomer weight score, for an indication or disease state, wherein the diagnosis output classifies the biological sample as evidencing a state associated with a disease state progression and/or responsiveness to a specific therapy.

279. The method of any one of claims 265-278, wherein the set of raw abundance values is generated using multiple reaction monitoring mass spectrometry (MRM-MS).

280. The method of any one of claims 265-279, further comprising:
generating a diagnosis output based on the monomer weight score for an indication or disease state, and
generating a treatment output based on at least one of the diagnosis output.

281. The method of claim 280, wherein the treatment output comprises at least one of an identification of a treatment to treat the subject or a treatment plan.

282. The method of claim 281, wherein the treatment comprises at least one of radiation therapy, chemoradiotherapy, surgery, immunotherapy, hormone therapy, or a targeted drug therapy.

283. The method of claim 282, wherein the treatment comprises immunotherapy, wherein the immunotherapy is immune checkpoint blockade therapy.

284. The method of claim 283 wherein the immune checkpoint blockade therapy comprises ipilimumab, nivolumab, and/or pembrolizumab.

285. The method of any one of claims 265-284, further comprising generating a diagnosis output, wherein generating the diagnosis output comprises:
generating a report identifying that the biological sample evidences the indication or disease state.

286. The method of any one of claims 265-285, wherein the specific monomer is selected from the group consisting of hexose, HexNac, fucose, and sialic acid.

287. The method of claim 286, wherein the specific monomer is selected from the group consisting of glucose, mannose, galactose, GlcNAc, GalNAc, fucose, NeuGc, and NeuAc.

288. The method of any one of claims 265-287, further comprising calculating a second monomer weight score as a sum of the site occupancy score and a second multiplier, wherein the second multiplier is the number of a second monomer in the set of peptide structures at the linking site, wherein the second monomer is different from the specific monomer.

289. The method of any one of claims 265-288, further comprising calculating a plurality of additional monomer weight scores as functions of the site occupancy score and a plurality of additional multipliers, wherein the plurality of additional multipliers are the number of a plurality of additional monomers in the set of peptide structures at the linking site.

290. A method of classifying a biological sample with respect to risk of melanoma progression and/or responsiveness to immune checkpoint inhibitor therapy, the method comprising:
A) analyzing one or more monomer weight scores of a set of peptide structures from a biological sample from the subject using a machine learning model to generate a disease indicator; and
B) generating a diagnosis output based on the disease indicator that classifies the biological sample as evidencing a state associated with melanoma progression and/or responsiveness to immune checkpoint inhibitory therapy.

291. The method of claim 290, further comprising:
receiving a set of raw abundance values of the set of peptide structures and normalizing the set of raw abundance values to a corresponding reference run to generate the set of adjusted-raw abundance values.

292. The method claim 291, further comprising:
calculating a site occupancy score, for a given peptide structure at the linking site, as the function of the adjusted-raw abundance value for the given peptide structure and the sum of the set of adjusted-raw abundance values.

293. The method of claim 291 or 292, further comprising:
calculating a site occupancy score, for a given peptide structure at the linking site, as the quotient of the adjusted-raw abundance value for the given peptide structure over the sum of the set of adjusted-raw abundance values.

294. The method of any one of claims 292-293, further comprising:
calculating a peptide structure monomer weight score as a function of the site occupancy score and the number of specific monomers for the given peptide structure.

295. The method of any one of claims 292-294, further comprising:
calculating a peptide structure monomer weight score as a product of the site occupancy score and the number of specific monomers for the given peptide structure.

296. The method of any one of claims 294-295, further comprising:
calculating a monomer weight score of the one or more monomer weight scores as a sum of peptide structure monomer weight scores for each peptide structure at the linking site.

297. The method of any one of claims 290-296, wherein the set of peptide structures comprises post translationally modified (PTM) peptides and/or non-PTM peptides.

298. The method of any one of claims 290-297, wherein the monomer is selected from the group consisting of hexose, HexNac, fucose, and sialic acid.

299. The method of claim 298, wherein the monomer is selected from the group consisting of glucose, mannose, galactose, GlcNAc, GalNAc, fucose, NeuGc, and NeuAc.

300. The method of any one of claims 290-299, wherein the set of peptides structures comprises glycosylated peptides and non-glycosylated peptides.

301. The method of any one of claims 290-300, wherein the biological sample comprises serum or plasma samples.

302. The method of any one of claims 291-301, wherein the reference run comprises serum or plasma samples.

303. The method of any one of claims 290-302, further comprising:
treating the biological sample to form a prepared sample comprising the set of peptide structures, the set of peptide structures comprising a set of post translationally modified (PTM) peptides and/or non-PTM peptides;
detecting a set of product ions associated with each structure of the set of post translationally modified (PTM) peptides and/or non-PTM peptides, and
generating the set of raw abundance values for the set of product ions.

304. The method of any one of claims 290-303, wherein the analyzing further comprises:
correlating the monomer weight score with a melanoma disease state to determine a hazard ratio for the melanoma disease state, wherein the hazard ratio is used to update a risk profile of the subject for the melanoma disease state.

305. The method of any one of claims 290-304, further comprising:
generating a diagnosis output based on the disease indicator that classifies the biological sample as evidencing a state associated with melanoma progression and/or responsiveness to immune checkpoint inhibitory therapy, wherein the diagnosis output is one of a predictive probability or a risk score.

306. The method of any one of claims 290-305, wherein the set of raw abundance values is generated using multiple reaction monitoring mass spectrometry (MRM-MS).

307. The method of any one of claims 290-306, further comprising:
generating a treatment output based on at least one of the diagnosis output.

308. The method of claim 307, wherein the treatment output comprises at least one of an identification of a treatment to treat the subject or a treatment plan.

309. The method of claim 308, wherein the treatment comprises at least one of radiation therapy, chemoradiotherapy, surgery, hormone therapy, or a targeted drug therapy.

310. The method of any one of claims 290-309, wherein generating the diagnosis output comprises:
generating a report identifying that the biological sample evidences the indication or disease state.

311. The method of any one of claims 290-310, wherein the one or more monomer weight scores correspond to at least one site monomer identified in Table 16.

312. The method of any one of claims 290-310, wherein the one or more monomer weight scores correspond to at least one site monomer identified in Table 17.

313. The method of any one of claims 290-310, wherein the one or more monomer weight scores correspond to at least one site monomer identified in Table 18.

314. The method of any one of claims 290-313, further comprising:
training the at least one supervised machine learning model using training data,
wherein the training data comprises a plurality of peptide structure profiles for a plurality of subjects and a plurality of subject diagnoses for the plurality of subjects.

315. The method of claim 314, wherein the plurality of subject diagnoses is selected from the group consisting of a positive diagnosis for any subject of the plurality of subjects determined to have a melanoma disease state, a negative diagnosis for any subject of the plurality of subjects determined not to have a melanoma disease state, a positive diagnosis for any subject of the plurality of subjects determined to be likely to benefit from immune checkpoint inhibitory therapy, and a negative diagnosis for any subject of the plurality of subjects determined to be unlikely to benefit from immune checkpoint inhibitory therapy.

316. The method of claim 315, wherein the plurality of subjects are separated into classes of positive and negative diagnoses using a concordance index as a cutoff between positive and negative diagnoses.

317. The method of any one of claims 314-316, further comprising:
performing a differential expression analysis using the training data to compare a first portion of the plurality of subjects with the positive diagnosis for melanoma disease state or subjects unlikely to benefit from immune checkpoint inhibitory therapy, versus a second portion of the plurality of subjects having the negative diagnosis for melanoma disease state or subjects likely to benefit from immune checkpoint inhibitory therapy; and
identifying a training group of peptide structures based on the differential expression analysis for use as prognostic markers for the melanoma disease state and/or responsiveness to immune checkpoint inhibitory therapy; and
forming the training data based on the training group of peptide structures identified.

318. The method of any one of claims 290-317, wherein the at least one supervised machine learning model comprises a logistic regression model, and wherein the at least one supervised learning model compares the negative diagnosis versus the positive diagnosis, wherein the comparison can be at least one non-melanoma state vs at least one melanoma state, or the comparison can be at least one positive response to immune checkpoint inhibitory therapy vs at least one negative response to immune checkpoint inhibitory therapy.

319. A method of treating melanoma in a subject, the method comprising:
A) analyzing one or more monomer weight scores corresponding to at least one site monomer identified in Table 16 using a machine learning model to generate a diagnosis output that classifies the biological sample as evidencing a state associated with melanoma progression, and
B) administering a therapeutically effective amount of a treatment for melanoma.

320. The method of claim 319, further comprising:
receiving a set of raw abundance values of the set of peptide structures and normalizing the set of raw abundance values to a corresponding reference run to generate the set of adjusted-raw abundance values.

321. The method of claim 320, further comprising:
calculating a site occupancy score, for a given peptide structure at the linking site, as the function of the adjusted-raw abundance value for the given peptide structure and the sum of the set of adjusted-raw abundance values.

322. The method claim 320 or 321, further comprising:
calculating a site occupancy score, for a given peptide structure at the linking site, as the quotient of the adjusted-raw abundance value for the given peptide structure over the sum of the set of adjusted-raw abundance values.

323. The method of any one of claims 321-322, further comprising:
calculating a peptide structure monomer weight score as a function of the site occupancy score and the number of specific monomers for the given peptide structure.

324. The method of any one of claims 321-323, further comprising:
calculating a peptide structure monomer weight score as a product of the site occupancy score and the number of specific monomers for the given peptide structure.

325. The method of claim 323 or 324, further comprising:
calculating the a monomer weight score of the one or more monomer weight scores as a sum of peptide structure monomer weight scores for each peptide structure at the linking site.

326. The method of any one of claims 319-325, wherein the set of peptide structures comprises post translationally modified (PTM) peptides and/or non-PTM peptides.

327. The method of any one of claims 319-326, wherein the monomer is selected from the group consisting of hexose, HexNac, fucose, and sialic acid.

328. The method of claim 327, wherein the monomer is selected from the group consisting of glucose, mannose, galactose, GlcNAc, GalNAc, fucose, NeuGc, and NeuAc.

329. The method of any one of claims 319-328, wherein the set of peptides structures comprises glycosylated peptides and non-glycosylated peptides.

330. The method of any one of claims 319-329, wherein the biological sample comprises serum or plasma samples.

331. The method of any one of claims 320-330, wherein the reference run comprises serum or plasma samples.

332. The method of any one of claims 319-331, further comprising:
treating the biological sample to form a prepared sample comprising the set of peptide structures, the set of peptide structures comprising a set of post translationally modified (PTM) peptides and/or non-PTM peptides;
detecting a set of product ions associated with each structure of the set of post translationally modified (PTM) peptides and/or non-PTM peptides, and
generating the set of raw abundance values for the set of product ions.

333. The method of any one of claims 319-332, wherein the analyzing further comprises:
correlating the one or more monomer weight scores with a melanoma disease state to determine a hazard ratio for the melanoma disease state, wherein the hazard ratio is used to update a risk profile of the subject for the melanoma disease state.

334. The method of any one of claims 319-333, further comprising:
generating a diagnosis output based on a disease indicator that classifies the biological sample as evidencing a state associated with melanoma progression, wherein the diagnosis output is one of a predictive probability or a risk score.

335. The method of any one of claims 319-334, wherein the set of raw abundance values is generated using multiple reaction monitoring mass spectrometry (MRM-MS).

336. The method of any one of claims 319-335, wherein the treatment comprises at least one of radiation therapy, chemoradiotherapy, immunotherapy, surgery, hormone therapy, or a targeted drug therapy.

337. The method of claim 336, wherein the treatment comprises immunotherapy, wherein the immunotherapy is immune checkpoint blockade therapy.

338. The method of claim 337 wherein the immune checkpoint blockade therapy comprises ipilimumab, nivolumab, and/or pembrolizumab.

339. The method of any one of claims 319-338, wherein generating the diagnosis output comprises:
generating a report identifying that the biological sample evidences the indication or disease state.

340. The method of any one of claims 319-339, wherein the one or more monomer weight scores correspond to at least one site monomer identified in Table 17.

341. The method of any one of claims 319-339, wherein the one or more monomer weight scores correspond to at least one site monomer identified in Table 18.

342. The method of any one of claims 319-341, further comprising:
training the at least one supervised machine learning model using training data,
wherein the training data comprises a plurality of peptide structure profiles for a plurality of subjects and a plurality of subject diagnoses for the plurality of subjects.

343. The method of claim 342, wherein the plurality of subject diagnoses is selected from the group consisting of a positive diagnosis for any subject of the plurality of subjects determined to have a melanoma disease state, a negative diagnosis for any subject of the plurality of subjects determined not to have a melanoma disease state, a positive diagnosis for any subject of the plurality of subjects determined to be likely to benefit from immune checkpoint inhibitory therapy, and a negative diagnosis for any subject of the plurality of subjects determined to be unlikely to benefit from immune checkpoint inhibitory therapy.

344. The method of claim 343, wherein the plurality of subjects are separated into classes of positive and negative diagnoses using a concordance index as a cutoff between positive and negative diagnoses.

345. The method of any one of claims 342-344, further comprising:
performing a differential expression analysis using the training data to compare a first portion of the plurality of subjects with the positive diagnosis for melanoma disease state or subjects unlikely to benefit from immune checkpoint inhibitory therapy, versus a second portion of the plurality of subjects having the negative diagnosis for melanoma disease state or subjects likely to benefit from immune checkpoint inhibitory therapy; and
identifying a training group of peptide structures based on the differential expression analysis for use as prognostic markers for the melanoma disease state and/or responsiveness to immune checkpoint inhibitory therapy; and
forming the training data based on the training group of peptide structures identified.

346. The method of any one of claims 319-345, wherein the at least one supervised machine learning model comprises a logistic regression model, and wherein the at least one supervised learning model compares the negative diagnosis versus the positive diagnosis, wherein the comparison can be at least one non-melanoma state vs at least one melanoma state, or the comparison can be at least one positive response to immune checkpoint inhibitory therapy vs at least one negative response to immune checkpoint inhibitory therapy.

347. A system comprising:
one or more data processors; and
a non-transitory computer readable storage medium containing instructions which, when executed on the one or more data processors, cause the one or more data processors to perform part or all of the method of any one of claims 265-346.

348. A computer-program product tangibly embodied in a non-transitory machine-readable storage medium, including instructions configured to cause one or more data processors to perform part or all of the method of any one of claims 265-346.

349. A method of monitoring a subject for a melanoma, the method comprising:
receiving first monomer weight score data for a first biological sample obtained from a subject at a first timepoint;
analyzing the first monomer weight score data using at least one supervised machine learning model to generate a first disease indicator based on at least one site monomer selected from a group of site monomers identified in Table 16, wherein the group of site monomers in Table 16 comprises a group of site monomers having monomer weight scores associated with melanoma;
receiving second monomer weight score data of a second biological sample obtained from the subject at a second timepoint;
analyzing the second monomer weight score data using the at least one supervised machine learning model to generate a second disease indicator based on the at least one site monomer selected from the group of site monomers identified in Table 16; and
generating a diagnosis output based on the first disease indicator and the second disease indicator.

350. The method of claim 349, wherein generating the diagnosis output comprises: comparing the second disease indicator to the first disease indicator.

351. The method of claim 349 or 350, wherein the first disease indicator indicates that the first biological sample evidences a negative diagnosis for melanoma and the second biological sample evidences a positive diagnosis for melanoma.

352. The method of claim 349 or 350, wherein the first disease indicator indicates that the first biological sample evidences a melanoma that is not responsive to immunotherapy and the second biological sample evidences a melanoma that is responsive to immunotherapy.

353. The method of any one of claims 349-352, wherein the at least one supervised machine learning model comprises a logistic regression model, and wherein the at least one supervised learning model compares negative diagnoses versus positive diagnoses, wherein the comparison can be at least one healthy state versus melanoma generally, healthy state versus immunotherapy responsive melanoma, or immunotherapy nonresponsive melanoma versus immunotherapy responsive melanoma.

354. The method of any one of claims 349-353, wherein the at least one site monomer comprises at least one site monomer identified in Table 18.

355. The method of any one of claims 349-353, wherein the at least one site monomer comprises at all site monomers identified in Table 18.

356. A method of treating melanoma in a subject, the method comprising:
determining a monomer weight score for at least one site monomer identified in Table 16 in a biological sample from the subject using a multiple reaction monitoring mass spectrometry (MRM-MS) system;
analyzing the monomer weight score using at least one machine learning model to generate a disease indicator;
generating a diagnosis output based on the disease indicator that classifies the biological sample as evidencing that the patient has melanoma; and
administering to the subject a therapeutically effective amount of a melanoma therapy.

357. The method of claim 356, wherein the melanoma therapy comprises radiation therapy, chemotherapy, chemoradiotherapy, surgery, hormone therapy, immunotherapy, or a targeted drug therapy.

358. The method of claim 357, wherein the melanoma therapy comprises immunotherapy.

359. The method of claim 358, wherein the immunotherapy comprises immune checkpoint blockade therapy.

360. The method of claim 283 wherein the immune checkpoint blockade therapy comprises ipilimumab, nivolumab, and/or pembrolizumab.

361. The method of claim 356, wherein the melanoma therapy does not comprise immunotherapy.

362. The method of any one of claims 356-361, further comprising: preparing the biological sample to form a prepared sample comprising a set of peptide structures; and inputting the prepared sample into the MRM-MS system using a liquid chromatography system.

363. The method of any one of claims 356-362, wherein the at least one site monomer comprises at least one site monomer identified in Table 17.

364. The method of any one of claims 356-362, wherein the at least one site monomer comprises at least one site monomer identified in Table 18.

365. The method of any one of claims 356-362, wherein the at least one site monomer comprises at all site monomers identified in Table 18.

366. A method of treating melanoma in a subject, the method comprising:
determining a monomer weight score for at least one site monomer identified in Table 16 in a biological sample from the subject using a multiple reaction monitoring mass spectrometry (MRM-MS) system;
analyzing the monomer weight score using at least one machine learning model to generate a disease indicator;
generating a diagnosis output based on the disease indicator that classifies the biological sample as evidencing that the melanoma is sensitive to immunotherapy; and
administering to the subject a therapeutically effective amount of immunotherapy.

367. The method of claim 366, wherein the immunotherapy comprises immune checkpoint blockade therapy.

368. The method of claim 367 wherein the immune checkpoint blockade therapy comprises ipilimumab, nivolumab, and/or pembrolizumab.

369. The method of claim 366, 367, or 368, wherein the at least one site monomer comprises at least one site monomer identified in Table 17.

370. The method of claim 366, 367, or 368, wherein the at least one site monomer comprises at least one site monomer identified in Table 18.

371. The method of claim 366, 367, or 368, wherein the at least one site monomer comprises at all site monomers identified in Table 18.

372. A method of identifying a need for one or more medical tests for a subject suspected of being at risk for or having melanoma, the method comprising: subjecting the subject to the one or more medical tests in response to measuring that a biological sample obtained from the subject evidences the subject as having melanoma using part or all of the method of any one of claims 265-346.

373. The method of claim 372, wherein the one or more medical tests comprises colonoscopy, physical exam, CT scan, MRI scan, PET scan, or a combination thereof.

374. A method of designing a treatment for a subject having melanoma, the method comprising:
designing a therapeutic regimen for treating the subject in response to measuring that a biological sample obtained from the subject evidences the subject as having melanoma using part or all of the method of any one of claims 265-346.

375. The method of claim 374, wherein the treatment comprises at least one of radiation therapy, chemotherapy, chemoradiotherapy, immunotherapy, surgery, hormone therapy, or a targeted drug therapy.

376. A method of treating a subject diagnosed with melanoma, the method comprising:
administering to the subject immunotherapy to treat the subject based on measuring that a biological sample obtained from the subject evidences the melanoma as being sensitive to immunotherapy using part or all of the method of any one of claims 265-346.

377. The method of claim 376, wherein the immunotherapy comprises immune checkpoint blockade therapy.

378. A method of classifying a sample from an individual suspected of having, known to have, or at risk for melanoma, comprising the step of determining from the sample a monomer weight score for one or more of the site monomers in Table 16.

379. The method of claim 378, wherein the measuring identifies the individual as not having melanoma.

380. The method of claim 378, wherein the measuring identifies the individual as having melanoma.

381. The method of claim 380, further comprising administering to the individual an effective amount of at least one of radiation therapy, chemotherapy, chemoradiotherapy, immunotherapy, surgery, hormone therapy, or a targeted drug therapy.

382. The method of claim 378, wherein the measuring identifies the individual as having melanoma that is sensitive to immunotherapy.

383. The method of claim 378, wherein the measuring identifies the individual as having melanoma that is not sensitive to immunotherapy.

384. The method of any one of claims 378-383, wherein the sample comprises peripheral blood, plasma, or serum.

385. The method of any one of claims 378-384, wherein the individual is at risk for melanoma.

386. The method of any one of claims 378-385, wherein a monomer weight score is determined for one or more of the site monomers identified in Table 17.

387. The method of any one of claims 378-385, wherein a monomer weight score is determined for one or more of the site monomers identified in Table 18.

388. The method of claim 387, wherein a monomer weight score is determined for all site monomers identified in Table 18.

389. A method of predicting a risk for melanoma in a subject, the method comprising:
determining a monomer weight score for at least one site monomer identified in Table 16 in a biological sample from the subject using a multiple reaction monitoring mass spectrometry (MRM-MS) system;
analyzing the monomer weight score using at least one machine learning model to generate a disease indicator; and
generating a diagnosis output based on the disease indicator that classifies the biological sample as evidencing that the patient has a risk for melanoma.

390. The method of claim 389, wherein the at least one site monomer comprises at least one site monomer identified in Table 17.

391. The method of claim 389, wherein the at least one site monomer comprises at least one site monomer identified in Table 18.

392. The method of claim 389, wherein the at least one site monomer comprises at all site monomers identified in Table 18.

393. A method of predicting immunotherapy sensitivity, the method comprising:
determining a monomer weight score for at least one site monomer identified in Table 16 in a biological sample from the subject using a multiple reaction monitoring mass spectrometry (MRM-MS) system;
analyzing the monomer weight score using at least one machine learning model to generate a disease indicator; and
generating a diagnosis output based on the disease indicator that classifies the biological sample as evidencing that the patient has a risk for melanoma.

394. The method of claim 393, wherein the at least one site monomer comprises at least one site monomer identified in Table 17.

395. The method of claim 393, wherein the at least one site monomer comprises at least one site monomer identified in Table 18.

396. The method of claim 393, wherein the at least one site monomer comprises at all site monomers identified in Table 18.

397. A method of classifying a biological sample with respect to a responsiveness to immune checkpoint inhibitor therapy, the method comprising:
A) analyzing one or more monomer weight scores of a set of peptide structures from a biological sample from the subject using a machine learning model to generate a disease indicator; and
B) generating a diagnosis output based on the disease indicator that classifies the biological sample as evidencing the responsiveness to immune checkpoint inhibitory therapy, wherein the one or more monomer weight scores correspond to at least one site monomer identified in Table 29.

398. A method of classifying a biological sample with respect to a responsiveness to immune checkpoint inhibitor therapy, the method comprising:
A) analyzing one or more monomer weight scores of a set of peptide structures from a biological sample from the subject using a machine learning model to generate a disease indicator;
B) generating a diagnosis output based on the disease indicator that classifies the biological sample as evidencing the responsiveness to immune checkpoint inhibitory therapy, wherein the one or more monomer weight scores correspond to at least one site monomer identified in Table 29; and
C) administering to the subject a therapeutically effective amount of immunotherapy.

399. A method for managing a treatment for a subject diagnosed with a melanoma, the method comprising:
receiving peptide structure data corresponding to a set of glycoproteins in a biological sample obtained from the subject;
computing a treatment score using quantification data identified from the peptide structure data for a set of peptide structures, wherein the set of peptide structures includes at least one peptide structure identified from a plurality of peptide structures listed in Table 23A;
generating a treatment output that indicates a predicted response to the treatment for the subject using the treatment score.

400. The method of claim 399, wherein the at least one peptide structure of Table 23A includes a glycan symbol structure or a glycan composition in accordance with Table 23C.

401. A method for predicting retention times of peptides, by a computing system comprising one or more processors:
accessing a feature set corresponding to a peptide, wherein the feature set represents peptide sequence data of the peptide and corresponding physicochemical features;
sending the feature set as an input into a neural network, the neural network comprising: (1) a plurality of 1DCNN layers, (2) one or more BiLSTM layers, and (3) a multi-head attention layer; and
obtaining, as an output from the neural network, a predicted retention time for the peptide corresponding to an estimated retention time for the peptide in a liquid chromatography mass spectrometry (LC-MS) run.

402. The method of claim 401, wherein the neural network further comprises a flatten and dense layer as a final output layer.

403. The method of claim 401, wherein the feature set for a peptide is generated by:
encoding a peptide sequence of the peptide to generate a matrix representation of the peptide;
compressing the matrix representation to a vector representation; and
concatenating, to the vector representation, one or more corresponding physiochemical features that are determined to be associated with the peptide or peptide sequence.

404. The method of claim 403, wherein generating the feature set further comprises normalizing the concatenated vector representation between 0 and 1.

405. The method of claim 403, wherein the peptide sequence data is encoded using one-hot encoding.

406. The method of claim 405, wherein the matrix representation comprises:
20 columns corresponding to 20 unique amino acids, and
n rows, wherein each row corresponds to a position in a sequence of the corresponding peptide, and wherein n corresponds to a length of the corresponding peptide.

407. The method of claim 403, wherein the peptide sequence data is encoded using BLOSUM 62.

408. The method of claim 407, wherein the encoding generates a matrix comprising:
20 columns corresponding to 20 unique amino acids;
3 columns corresponding to 3 special amino acid characters; and
1 column corresponding to a translation stop.

409. A method of training a neural network for predicting retention times of peptides, by a computing system comprising one or more processors:
accessing a plurality of feature sets corresponding to a plurality of peptides, wherein the feature set represents peptide sequence data of the peptide and corresponding physicochemical features;
creating a training set comprising a subset of feature sets from the plurality of feature sets; and
training a neural network using the training set, the neural network comprising: (1) a plurality of 1DCNN layers, (2) one or more BiLSTM layers, and (3) a multi-head attention layer.

410. The method of claim 409, further comprising:
creating a validation set comprising a subset of feature sets from the plurality of feature sets;
sending the validation set through the neural network; and
evaluating the outputs.

411. The method of claim 410, wherein the training set comprises 80% of the plurality of feature sets and the validation set comprises 30% of the plurality of feature sets.

412. A system for predicting retention times of peptides, the system comprising:
one or more processors; and
a non-transitory memory coupled to the processors comprising instructions executable by the processors, the processors operable when executing the instructions to:
access a feature set corresponding to a peptide, wherein the feature set represents peptide sequence data of the peptide and corresponding physicochemical features;
send the feature set as an input into a neural network, the neural network comprising: (1) a plurality of 1DCNN layers, (2) one or more BiLSTM layers, and (3) a multi-head attention layer. obtain, as an output from the neural network, a predicted retention time for the peptide corresponding to an estimated retention time for the peptide in a liquid chromatography mass spectrometry (LC-MS) run.

413. A system for training a neural network for predicting retention times of peptides, the system comprising:
one or more processors; and
a non-transitory memory coupled to the processors comprising instructions executable by the processors, the processors operable when executing the instructions to:
access a plurality of feature sets corresponding to a plurality of peptides, wherein the feature set represents peptide sequence data of the peptide and corresponding physicochemical features;
create a training set comprising a subset of feature sets from the plurality of feature sets; and
train a neural network using the training set, the neural network comprising: (1) a plurality of 1DCNN layers, (2) one or more BiLSTM layers, and (3) a multi-head attention layer.

414. A computer-readable medium comprising instructions thereon, which when executed by a processor causes the processor to perform the method of any one of claims 401 to 411.
